United States Patent Application Publication US 2003/0186277 A1 - sequence listing, part 4

SEQ ID NO: 2 - DNA, 3673778 bp, Artificial Sequence (residues 1,836,890-3,673,778 of 3,673,778)
  chemically treated genomic DNA (Homo sapiens)
  unsure (379615)
gagttatgattgtattattgtattttaggttgggagatagaatgagattttgttttaaaataaataagtaaataaataataaaggaaatttttattatattattaggggtattttggttgagcgcggtggtttacgtttgtaattttagtattttgggaggttaggttggtaggttatttgaggtcgggagtttgagattagtttgattaatacggagaaatcgtttttattaaaaatataaaattagtcgggcgtgatggtgtatgtttgtaattttagttatttgggaggttgaggtaggagaattttttgaatttaggaggtagaggttgaggtgggttgaaatcgcgttattgtattttagtttgggtaataatagggaaattttattttaaaaaaataaaataaaataaaaaataaaatttttatttttgcgaggtaaattgggtttatagaggtaagttgtatgtttttgttgatggtagagttggggtttggatgtaggtttgtttcggggtaattcgtttttttgttttttagggttttgttttttataatatgagttgttaagttagatgtttgtatttagtaaatttattttgttttaagtaaaaataataagaaataaatttgaatatgttagtttattttaggtacgttaaaggaaatttttaaatagggggttttttgattatttgggggagttttgggggaggggttttttgtttatatttgagttgggggatgttagggttgtttatttggatttagaggtttttttgtaatgtttttattttagaaggaaatttttagatggggaaagaaggttttagtttttattttagtaagtagggttttatttataaagagttgtttttattatttttttttttttttttgagacggagttttgttgtgttgtttaggttggaatgtagtagtgtaatttcggtttattataatttttgtttttcgggtttaagtgatttttttgttttagttttttaagtagttgagattataggtgtgtgttattatgtttggttaatttttgtatttttagtatagatgggggttttattatgttggttaggttggtttcgaatttttgatttcgtgatttgattgttttggttttttaaagtgttgggattataggtatgatttatcgtatttggtttttattattattataatattattaggttttttatttgaattttttagtgttaaaggttttgtagaatttaaatgtttttgggatttgatagggttgatttaaaagtatatttattttatattaggtagtttaggagggtttaggtagtttaagaattaaatatatgagtgtttttgtagggaaatgtatgaatattgatattagtaggatgaaaataaataatagttttattttagtttagattaggtttttgttattaaatgaattttggtggtagtttgatgaaaaatgttggtttttagagtgtttttgagtttagaattgtggttaagggagtatggatttgttgataataaaaataggaataaggttaggtgtggtggtttatatttgtaattttagtattttgagaggttgaggttggtggattatttgaggttaggtatttaagattagtttgtttaatatggcgaaaatttattttttttaaaaatataaaaattagttgggcgtggtggtatgcgtttgtaattttagttatttgggaggttgacgtatgagaattatttgaatttgggaggtagaggttgtagtgagttaggatcgtattattgtattttagtttgggtaagaagagtgaaattttataaaaaataaaaataaaaataaaaaatagagaaataggaataataatcgttagtatatattaagtgtttatcgtgtgtgttaggtattttaattatgtattatgttagttgatttttaaaatatatatggtataatatgggtattttgaatatgggtataattaatgtataatgttataatgtataatataggataatgtagttgttaaaagtatggatattttatttagtttatttgggttataatttttgttttattagtgaataattgtaattttggtaaatgatttttttatgttttgtttttttagttgggaaatgggggataatattagtatttattttttaagattgttgtgaggattaaatgtgttattttataagaaatgtttggtatatagtaaaggttgttattattttaatttttatatatgggtaaattaagttttaagtaatttgtttaagaatacgtagttatgaagtgtggagttgggatttggagttggggtttgaatttaggtaatttaattttagagtttattttttatgttattttttggttacgagtaaataatttgttaagaaataaagtagttattaatttaaatagatgtgaaatttgaagattagttgatttttggggaatgttgggttttttagataatggtagtttagtaatgtaaagggataaatgatagttatatgttaatttggttaattttttttttaggttttgatgattaaataattagtttattttttaattattggttggtttttattttaggtttggttagttgtttatgattttgttttttattgagtagatttattatttgggttttggcgggtagtagtatgtagtgtcgtgtttttatggcggttttggtgggtagggttagtttcgagtcgaagtagtaggtatagggtaggggtatcgtggcgggtataggttcggtgtagtggtgggggttgtttagtatttatatcgaggtttgggtgtcgttggaggagggtttgggttcggattagtcgttttgtagataagtaacgacgaaagcgacgttttcggcgttggcggcgggaagtggaggttatggaatttttgggttggggaaggaaaaaaggtagtagttaggattttagttttggttggtttttttttttttatttttgatattttttgttgtttttttttttggtttcgtttttttttaatatttttagtaagagatgaggtttaatttaattttgattttttattagatgatagatttgaaaaaaaattttttttgaggggggtgataggattagaggtttaatttttttaatgtaaaattcgagaaaagggtaaataattggtttaaggtttaggagtttaggtaaatttttaatttttaataaagaattttaaaaaaatttaatagggtcggatggggaaaatttttattagtagaaatttgagttttaaaaagttatagataatttttaataatgatttagaaattgaatattatgtattcggtagatagatgtggaggtttttttttttggaatttggggggaggggttatttattagatttgttttcgtttttttaagtatttttagagtcgtaggtttaaggtttgtgtttaagaagttcggagacgggaggcgggaagggcggagatattttaggttggaggaaatggcgtaagtagagacgtaggtggaggacggaagtgaattgtgaggggcgttatcggatgtcgtttcgtttcgatcgggtagtttttggttagattttttaggggaaattagggaatttaaattaaaggggtcgtttgaaattagaagattggattggaggcgaggaaaaggaggcgaggggaggggagggagaaaagagagttatttggaggttttttttcgttttttttaatttggtagagagaggagatggtttagtgatggacgaaaagatgagaagatagagaaaatagaggagataaagataggataaaaattatattaaatatggaaaataaaaataaaaattatagtgggataataatagggatagattaaaaaaaagaaaaaatatagataaaagacggaagaagattatcgtaggatggggtaagtgagatgtaaaaatttggatttgagaaatatgtagaaaaagatggagatgttaataacgggaggtaggggagggggcgggatggtggagagagagagaaaggtagagagttagtttagaattaagtttagaatgttttttttttaatataggttgtatgatgatatttttatttttttatcgtatttataattttttatgttttttttgttattattaattaagtttttttttttttattttagtattttttcgttttcgtttttgttttatttttagattttttcgattgggatggttaatttgttgtaagttcgtagttttgggtttggtttttgttgtttttaggcggtttttttgggtattgtttgagtaagaagtgttggagaggaggattagttattaataggaggatgagattgggagagatattcggtgtaggaggttgagtgagtaggggagtattaagatttaggggtagtggaggattgtagtaacgagttggaggaggagaagtaagcggtggggggtgggagttatttggtattttgatagtatttaaaatagtatcggttataataatagaaatggttagttagttttaaggtatttagtagtttttgtaagttgagaagcgggtagttgagaaggtggtagatgttagaaagagtgagttttttttttttttttttaggagtttggaaagaaaattgggggtgggggatagtaaatattttgggaaaatttaaggttggcgggaagatagttagggtttggaggttggttaggagggaagaaatggatggatattagaatttggtatttggttggttgagagaaggttgtataattttttggaagggattgatttttgttattatattgtgtgtgtgtgggtttatttttatttattgtttttttttttgtttttagggaaggttcggcgattgaagtaggtaaaggaggaggtatagatggaggtggagtaatatcgtagagagcgagagtacgaattttagagtaagtagtaggcggtgagttgaggtagagtcgggatgagattttattgtaagttggtgggtgtatttagtgaggtgtgtaagggtgatttaataagaaaatatggtggtagagggttgaggttgaggggattttggtagggattataatattggtgaaattttgtgatgatatgtaggagagtttgggagttttgaaggttatatagagtttgtgggcggaatgttatagtttgtgtaaagtataatatttatgtggagtatgattaatatttgtggtggagggtagagttttatggttatggatggtgaggtggtggggatattacggtttgttttaggatgaagttgtatgttaggtttaaggggaaaggggattgtgttgatttttttggtgttgggatatttttgtgggatgggggtggtttttgagagggttttttttttaggttttgttttaggatttttttttttatatgtttggatttttgtttgtttttgttttttttttttttttttttatttttttttttattttttaggttatgggtttttaggggaatttgtttgttgaggtggagtaggttataaggcgttaggtgtagggtatgtagagtttttagtagagaaatcgagagcgtgttttggtttagttttttggtatggtttgcgacgttaggttttaggtttattttaattatcggatttttgtttagggttatcgtagggtttgattttttttgttagtttttttttttaaagaaattttttaattaaaattattttttattataatttttgttttttttttattttttagaaattttgggaggtaggatttaataatttttttgtgatatttataaatattttgtttatatttgaatttttttgttgttttttaatttttattgggattttgtaaatttttaagttatttttatttaaattttttgtgaaatttgtaatatggggaagtaggaatgtggaaaatattttgattttagtgtttggtcgatgtgggttttttttttgattttgttatttgttggttgtgaaattaggataagttatttaatttggtagtttcgatgtttttttttgtgaaattgggatgataataatgtttattttgtgagggttgttttaatgattaggaattattttgtaaagtttagtatagttttttgtatgttgtagtagtgatttagtaagtagtaattttgtgatattattattattatttgtttattggttaaaatttatatagttgtttttttacgtttattattggttttttaattttatttgtttattttgtgattttagttattttttgaaaaattggtttttttttttttttagagattttttgatttttaaaaagaggagatgattatatttagttttttttttataattttaggtagataattgtattttgtagtttttttttgttttttttttgttgatttttgtttttattagatttttttttttttttatttttttaaagatttattagatgtttattgttttttaagatttaaaatgatattgtgtttttttatatgtatgttttttttttttatatttttgatattttatttttttattgtaataataaaaaaagtattaataaaataattattggtaaataaattggtgagttgaagtagtttttttttgttttattattttttatttttagttattttgttttttttttttttgagatggagttttgtttttgttgtttaggttggaatataatggcgtgattttagtttattgtaatttttgttttttaggtttaagcgatttttttgttttagttttttaagttgttggaattatgggtgtgtgttattacgtttggttattttttgtatttttagtagagatggggtttcgttatgttggttaggttggttttaaatttttgattttaagtgatttatttgttttggttttttaaagtgttgagattagaggtgtgagttattgtgtttggtttttagttatttttttgttttttgtttatatattttttaaatagtttaaatggttattttttgaaattttttggagaaataagaataagtagtattttattatttttttaaagtgagaaatatggttttttatttgggaatttgaggattatagatcgtaattgtagagaaaagttggagtgtaggagtaagtgttttttgtttttttattttgtattttttttatagtatttattgttattggttttttgagataaggttttgttgtgttgtttaggttggagttttagtttacggtagttttgattttttggatttaaatgatttttttattttagttttttgagtagttgggattacgggcgagtgttattatgttttgttaattttaaaattttttgtagagatggggttttatttgtttaggttggtttgaaatttttgggtttaagtaatttttcgggttcggtttttttaagggttgggttataggtttgagttattgtattttgattatttatcgatatttgatattatatttgtgtttatgtgtttttttttttgtaatgtaaatattgtgagaatagggttgtttatcgttgtgtttttagattttaggataatatgtggtataagggaggtagttgataaatatttttgaataaattaaatgatatttgggaaaatattttttatgatattatttttgaattagttattttatttgttattgaagataagtttattttattaagaatttgaattaataaggtaatttgtagtgtatttattaattagattttttgagtagggaggtagaatataatagagaatgagagatgtttgtattttggttgtaattttattagtcgtattgtttgagatatgttgttttgtttcgtttttgttaataagatgagaataacggtatttattttttagtattaaatgattaagtatgttaatagggagagggttaaacgtttgttgttttattatatagtaggatattaggttttatttttgtggttttttattttaaagacggggatagtaaatgttttatttaggaaaaaaatttaggttgaataatggggttgttggggcggggttaagaatattttgttcgaattaatagtattaatgggtcgggcgcggtggtttacgtttgtaattttagtattttgggaggtcgaagtgggtggattatttgaggttatatatgggtgaagtttcgtttttattaaaaaaataaaaatttgttgggcgtggtggcgggcgtttgtaattttagttattcgggaggttgaggtaggagaatcgtttgaattcgggaagtagcggttgtagtgagtcgagattaggatattgtattttcgtttgggcgatagggcgagattttgttttaaaataaaaataaaaatagtattaatggaatgtagtataatttttaagttttattattaatatttggggtcgaatttagatttcgttttttcgttcggatttagaatatttttttgatttattggttttagggtattagttatttcggatagtatttttttgggaaaatatcgtttattagttttacgattgggaaagagtcgggaaatattttcgagtaatttagttttttgagattttttttttttttttttttagttagggtttgtcggtttttagtgcgtgtttagtagtttttaggttatttttattatcgggttaaggatttcgtgggaattcgtagttttcgttatattcgtttttcgcgtatttacggaggggtgtttatagagaagatttgcgtggtaaaaatttaaacgaagagatgaggggtatggagaggagtaggataagagaataaagataatagtggggggtagacgttagttttttttatattttttgttattggcggtagtagtgaagttagaaacggttttaaaataaattttagataggtattttttaaaggtaagtttggagcgtacggatttgtataatcgcggaaggttttgttttcggttttttgcgtttgcgtttttgtagttaagaaggcgggaggttggagtagagggaagtttgtaatcggaagtgaaggtagatttttttttttcgtcgttgttgttgtcgttatacgcgttttttttgtttaggtaagttttggttttcgttataattcgtttttatttgcgttttttcgtatttatttcgttatatgggtttttgatattttttttataggcgatggtttggtcgttggggtttagttggttcgttatttttttagtttgtatttttttcgagagtaaagagtttttgggggaaggaagggaagttaaggggggatttaatttaagatggtgttttcggcgttattgtgttcgttttgttttttttttttaatgggttttttttatattggaggttttagtattaatgagaggcggtgttcggcgttttttggttttggtatttgcggagggcggggttttttttattttttttgtttttttttgagttttttttcggttttcggtgggattgggaggaggagttggtttttgggtttagttggattttttttattttgatttgtttaatttaatttggagtgttttttaagtgtttacgatacgattggtgttattgtatgtttttttaaaaggagttttattttcgtagcgtaatagtgatgtgagattatttggtaaagattttgttaaagtttgggcggggattgtttttttttgttatttattagtttttttattgtagggtggagatatgaattttgtttttttgtggtcgagttatttgttttgtatcgttttttttttttatgttaattatataaggtttgtttaaatagcggaagggaggatattgagaagtgggaggttgagagttatgggaggtggacggcggttatatgatgtttttttttcgaaaggtgagcgttttgcgtagtgatgatttttatttattatttttgattgatggttgttgagttaggtatttataacggtgggattataatagggaaagcggagtttttttttgaggattttttaggattttatttgttatttttattttttattttattaagttattagttatattttattttttattatttattttatttttttattgttatttttagattaagaatttataagttggttttttttttttaatttttttggttttcgttattgtgattgttaattttgttgggaatttttgttttaattattttttttggtattgttttttttgttttgttatatttgtttttcgtttttatgttttgtatttgtttttttttttaggtaaaagttttttggtttagggaaagtgggaattggggatggaaaagaggtcgtgattaagttttgtttttttttttttttttttagtttttttgttagaaatagtatttttgtttttttttgttgttttttaattttttattttttattttttgtttttatttattttgcgagaatttatttagatttttttttttttttttttttgtcggtttagttatggtagagaacgatgtggataatgagtttttggattatgaagatgatgaggtggagatagtagttgggggagatggggttgaggtttttgttaagaaggatgttaagggtttttatgtttttatttatagttttggttttcgtgattttttgtttaagttagagttgtttcgggttattgtcgattgtggttttgagtattcgttagaaggtaaatttttttttgggtatgtagtgtttattgggttttttaagggtataatataaagatgtgtttgtcgttgtttaggtggtggtaagggtttatatttaaggttagattagggttaggtgtagtggtttacgtttgtaattttagtattttgggaggttgaggtaggagggtggttatttgagtttaaaagtgtaagagaagtttgggtaatatagcgagatttttgtttttataaaacgtttagaaattaagtaggtgaaggttgaggttttagtgagtcgtgattgtattattgtgtattagtcggggcgatagtgaggaagaaaaaattgggataagtattaaaaataattttggatagaggaggtttatataggtttattttttttttcgtgatagtattaaagtgttaatgatttaaaagtgatttttaggtttgttatttatttttgtgattggttttttttgtttgtttatttttaattttgttatttgatttttaattttaaatttttagaaaggttttgtttggatttgtagtttttttttgttgggttaggttaattgtggtttttggaaatttttatgattggtttagagatgattggtttttgggttaggtattaagttttttattttgtttagggttgtagtagttacgtgattcgaagtatagtaatttaagtaggagaagtggtttgtggtaggtatttaaatgttatgaattgttatagattaagaaaaataaggatagagttaggattattgaaggtgagcggttggtagatgtaaggggtttgttattaggattgggaaggtttagatttggaggaggttaaagttaggaggaattaggagagtttgattttgaggtgaatgtaattgagtagagagaggtaaaatgggtttggaagttggtaagaattaggtaaatattagattttgagaattgagtggtaagaaatgggtttggtatggtgaaaaaggtagagttatttggagattgaagtttaatttatttttttttttttttaatttttagtttagtatgagtgtattttttaggttattttgggaatggatgttttgtgttaggttaagtcgggtatgggaaagatagtagtgtttgttttggttatattgtaatagttggagttagttattgggtaggtatatttggggagagtgttggggaggggattttggttaggattataagggaagggtgtttttgttttaattatatgatgtttgtagagttatgagtatatgatttttgttatttttgataatttgatagttgtgggggatgttttgtcgtaagcgtggggtttatgatttagattatagaattgaagttatttattatcggtttaggtgtgtttttgtgatagttatttttttagaggggataatgaagagttatatttattatatgttttcgtatattttttgtttaaggtgtttgtgttggtgatgtgttatattcgggagttggttttttagattagtaaggaatatgagcgtttttttaaatatatgtttaatgttaaggtaagttaaggtaaagagatttgagagtgagggtgtggtaagttggagggataagaaatttgtaggttaatagtttttttaattttggagaagttttagtttgttgtggtgtaatagagtgttgagtttttatgtaataggaggattcgtaattgggttatggatgatgtttaatataagattattttttttttattattttatattgattttgaattatattagtttaataattttggggtatgtggtagagaaagtcggaaattttaaaatagttttagtggtgtgtgaatattgaggattttggttaagtgtataatggtttatatttgtaattttagtagtttgggaggttaaggcgtgtggattatttgaggttaggagtttaagattaatgtggttaataggatgaaattttttttttattaaaaatgtaaaaattagtcgtgtatggtggtatatatttatagttttatttgtttgggaggttgaggtaggggaatcgtttgaatttaggaagtagaggttgtagtgagttgagattgtgttattatattttagtttgggtggtagagtgagatttttattttaaaaaaaaagaaaaaatttgattgaagttaagtatttttggtaagaattttttataggtgatgttgtattttttgttatgttataaatttggtcgatttatgttagttattttattttatttttatttatttgttttgagatggagtttcgttgtgttttttaggttgtgagtgtagtggcgcgattttagtttattgtaatttgcgttttttacgtttaagcgattttttcgttttaatttttcgagtagttgggattatagtgtgttattatgtttggttaatttttgtttttttttagtagtgatagggtttcgttatgttggttaggttggtttcgaatttttgattttaagtgatttatttatttcggttttttaaagtgttgggattataggagtgagttattgtatttggttttattaatgattttagatttattataggattagcgtcgtgatagtttgattttatagttgttttttttttttttgaaattagaaagtagtttttggtgttatttgatattgtattaaggtttagatttttaaataattatttatttaatggttttaatatgaaatgataatatttagttcgaagtagtaattttatggggtttgtgtgaaaagagtttgagattttgggtttatttaggaaattttaatgttttatgtgttttttgtggtattttatattaatttggtgattttttgttgttttttatttatttattttttattttttgagatggagtttcgttttgttatttaggttggagtatagtggtttaatttcgttttattgtaatttttatttttcgggtttaagcgatttttttgttttagtttttcggttaaattttgtattttttgttttttagtagtaaatttgtaaattttgtattttagtagagatggggttttatcgtgttggttaggttggttttgaatttttggttttaagtgatttattttttttgattttttaaattgttgggattataggcgtgagttattgggtttggttttattttatttttatttattttatttttttttgagatggagtattatttttgttgtttaggttggagtataacggtgggattttggtttattataatttttgttttttaggttttcgtgttttagttttttgagtagttggaattataggcgtgtgttattatatttggtttttttattttttaaatgaagtttggttttataaatgaaggaagttggttagattaagttagtagaattgaattattgttttgattgtttcgattagttatgtaattttaggtaattatttttagtgtttggtgggggggatataaaatttttaaattaggtgatttttaaagttagttttagtttggaaatatgttaaaaattggtttagtttaaatagagtgggaattttggggggattggatttttttttttttttgttttgagattttttgtttttggttcggtaggttgttgttttttttggtggtttgtttattaagaaggatgaagaggtgttgaagaagaattgttcgtatatcgtcgtggggattttaggtcgtattttagttttggttcgaaataagagttttaattttaaatatattaaatattttattttggatgaatgtgataagatgtttgaatagttcggtgagtggtagtgttggggtttggttaatgttggggagttgttttttggagttaaatgatgtttatttgaaataggagtattttagtgtaaggacgatttttatttattatttatgattgatggttttgggttttttggttggtttttattatgtttttaagtatagtaaagggtgttatttattatttttttatgatttttgtttttaatttttgagaataggggattttgataattttaggtataagttattattattattatcgtttttattatagatttatatattgggagttataggggagattttaaattgaaagagaagatagtatttttttggtatttttagtatagtatttatagttagaatttatagttgaataagtgtttagatttaggtttgggattaatgtagagagtgtttgtagtagtttgtgtgatgtggtattttagtgtgttaggtggggttaatggaagatttttttgtaagaattgaattttggtgaatgagagtggggttggatataggttttataagttattataaatgatttttggtaattttatatggtgagttgtaaaggtgggttttaggtagggatgttatatttgtttgatttgatagaaaagtaatttagagagttatagatggattttgatatttggaatataatatgtgtttgatatttgtagtttgttgaaggttggttggggtttgggtaggaaagggttgggagaaggttttataaagtatgttttgaaggttttgagagtttttgtattgggttttatttttattttatagttgggaattttggggttttattttattttttgtttggttaaaataaatagttggaatttgattttattttttgattttaagtttattgttttttttattgtgttgttattatttttagtaatttttattttattgggaagtttatttttaatttttgtttattatatttgtttatttttttttataatttttttttttgtttttgtagatatgcgtcgggatgtttaggaaatttttcgtatgattttttacgagaagtaggttatgatgtttagtgttattttgagtaaagagattcgtttagtttgtcgtaagtttatgtaagatgtaaatatttttttattttttttttttttatttttcgttcgttgtttttttttttttttcgtttttttttttagatttttttgttatttaagtgttaagaaggcggtttgtgtttaattgggagtaatgattttttgaagagatatatagaagtagagatagttagtgttagggtttgcgcgggtgttagggaaatttcggaagatttggtcgggttaatgtgagagcgggtagtgttcgatttttttataaattataatatttttgaatttttttttttttcgggggagggtaggatttttttgttttattatttatttatttatcgttttttatatgtattttatagttacgtatttttaaggtggtatcgagtatatagttggagttttttgtttattaaaatttttatttttcggtggtaggagagtaagagagggatagatagatggtagggtatgtttaaaagaagagtattagtataaatgaattttttttttttttatttttaggggtgggggtttttggtattttaattttcgatattttatttttttttatttatatttttttgtatttatttggaatttcggttgatgtgagtcggtaatagagaagtatcgtggcgcggcgagggaatgtagacggtatttagcggtggatggcggtagcggaggtcgcggggaaatttgattaggaagttgaggattaaattagttttttttttcgttttcggttttttttttgaatttaacgcgtgtcgtgtttcgttttttttaatatgtgttggggaggggtgttttgaatggggtggtagatttttttttttaaaaaaatttttttgttttttttaatatttagaggagagggatataggaaaggtaaagtggatgtaatcgggtggttgttagggtttggggttaggtggggttaattgtataagtagtggagtgtgttttttttttttttgtagtgtttttttcgtgggatgattattttttagttgtatttggggttagaatgagatttgaaggaggttatggaatttttttttagaaagtttgttttggttgggtttggtggtttatttttaattttagtattttgggaggttaaggtgggaggattgtttgagtttaggaatttgagattagttggggtagtgtagtgagattttgtttttattagaaaaatcgggcgtggtggcgtatgtttgtagttttagttatttgggaagttgaggtaggagggtttgtttgagttcgggacgtggaggtggtagtaagttgtaattgtgttattgtattttagtttgggtgatagagtgagattttgtattaaaataaaataaaaaataaaatttgttttttgggattgggtttttggttttttttttatgatatatatatttttttttattttgttttttgggtttttatattaattatttttttttaggatagtataaaaagtgttaggaaagttgggttttggagttgtggtaatttttgtttttgttattttttttttttttagggggttttttaattttaaagatgaatgtagtgaggtataatggtgtgtgtttgtagttttagttatttaggagattgaagtaggaggattatttgagtttaggaatttgaggttatagtgtgttatgattgtgttagtgaatagttattgtattttagtttgggtaatatggtgagattttgttttttaaaagcgtatttgttgttttgaatttggtattttaatattatttattgatattttttttgtaaatttgtagatggtttaatttttagttaagagattagttttatttaaaattattttgttgtggtttgacggtaagtaatttattttgagtaatttttgtttttttttaagtggtattttgattgtttattgtagtattttgattttaaaagatatttattttgttaatgtatacgagatttttttagttgaagtaggagaattaaatggagtagttgttttttttttattttatgtttttagaagtatttttgatggagttattttgattttgagttattgttttttattattttttagatgtttggtttttgttttttttttgagaattattttttattttttttttttttttatttttatttgaggtaatggtatttgtgttattgggtggttttattgttttttgattttatttgtagttttttttttatgatagtttttagttgggtagttttaaaatttatttgataggaaggaaattagatgtaatgtgagagagattatagtaaaatgtgggtatttttgggagtggggtggggtttttaatttttttttttttttttatttttttatggggtgtattggagattaattttttttatttttttaggtttaatttttttattttgtttttttttcgttttttatttttttttttttttttagttaatggagattttcgtggatgatgagacgaagttgacgttgtatgggttgtagtagtattacgtgaaattgaaggataacgagaagaatcggaagttttttgattttttggatgtttttgagtttaattaggttagttagacgtttagtagggggatgagtattggagtattttagttgtagtagaaatttggatattaagtatatttttattgaggaaattatatgtgtgatgtgggagagaataatgagggtataaatattttaggggttgagtatgagtaaggtgggagttgtttttttattttatggttggtacgggtatgtttttaataattttaaggaaaataaattttaaaaattaagatttttggttaggtacggtggtttatgtgtgtaattttagtatttggggaggttgagggaggtggattatttgagtttaggagtttgagattagtttgggtaatatggcgaaattttattattattaaagaagaaaaaaattagttaggtgtggtggtgtatgtttgtagttttagatattttggtggttgaggtgagaggatagtttgagtttaggaaattgaggttgtagtgaattatgattgtattattgtgttttagtttgggtaatagagtgagattttgtttttaaaagtttttgaaggattttaggaagttgttaaaagttttgaaacgatgtttgggggtatgttagggtttttgaatgtttaatttttttaataattgtttatttaagagaagtatttttgattgggtgtagggtagtggtttatgtttataattttagtattttgggaggttgaggtaggagtattgtttgagtttaggattttaagattagtttgggtaatatagggagacgttcgtttttataaatagtaaaaataaaaaataaaaaaagtagttgggcgtggtggtgtgtatttgtggttttagttgtttgggatgttgaggtggaaggattttttaaatttaggagggtggaggttgtagtgatttgcgattgtattattgtattttagtttgggggatagagtgagattttattttaaaaaagtgtttaattaatatatttgtgagtggtttatttgtatttaaaattgttttttagaattaggatagtttttttaggtttaatgttttggtgagtaggaatattagttatttttttagattttaattttagttttttattatttttttatgaggtgattttatttttattttttagtatgtttggtaattttgatttttgaattttgtgttattttagaggttagtttttttagggaaaaattagtgttgaaataaagttatatttttttttttgttttaaatatatagtgggggaataagagaaatgaagaggaatttttgagaacgtaattattagaaattttttttttttacgtaatgttttttatatattatggatttttatttttttaatttgcgattttttattttattttataataggtggtgatttttgtgaagtttgtgtagcggtgtattgttttggtttagttattagtggagtagaattttttagttattgttatttatcgtgggatgttttaggaggagaggtgagttgaagatgggaaagatattttgtgtttttgggagaaaaagatagttgagagaagggaattttaatatgttttaaatttttttttttataaaggttttttcggtattagtagtttaaagatttttaacgacgaatttttgtggttattaatttatttggtcgaggtatggatatcgagcgggtgaatattgtttttaattatgatatgtttgaggattttgatatttatttgtatcgggtaaattttataggttgaaaaaattttatttttttatttttttgttttttgtttgtatatttttatttttgtttttgggtttttttttttttcggttttttagtgttattttttgtttttttttaggtggttagagtaggtcggtttggtattaagggtttggttattatatttgtgttcgatgagaatgatgttaagatttttaatgatgtgtaggatcgttttgaggttaatattagtgagttgtttgatgagatagatatttttttttatagtgagtattgattttatgaaattttttaggttttttttgttttttagtgtgtttgttttaaattttattatataggttatgggtatttgatgtataatggatatttgattggtttatgttttttggtttttgatgttgtgttgggatgtttttttgatttttatgtggggtttttgtttttttttattatattatatttttttttttatttttacgttcgttttttgaatttaggtagtatattagtgtttgtatgtgtgtcgtgtgtttttgttttatttttttttttttatgttttattttgattatgttacgttttttttttagttgaatagatacggtagaagattcgtttattttggaatgtgatcgtttgttttttaggagaggatattagggtgggggtgaaggagatattattgtttttatttttgatagtttttattttatggtttttattttttgtattattattatttttgaatttttatttttgatttgttagaatttttttttaataaaattaaaaatgaaatatatgtgtttgtggtatttataagtgtttcgtttttttattgtatttggggtgaggttattttagggtatggtttagggtgaatttttataaggtttgggtgttttgtttgttgtgagattaaaggggaatgggattaagattgtagagttttggtttttttattgtttgttaattgtttgcggtttgtggttttttttattttttttggtttgggaagacgttggggtgtttatgattttaaggtttttggtgggtggtgcgtgtatttttagtgtcggagggtgttgtgggtattgggggaaatttaggtattttttttaaggtttttttggtgtttttttatttgtttttttagtttttggattttgagtattagggtttgggttttttaggtttttttttgttttttaaggagggtttggtatagttttagttgttgttttaataattttttagttcgggttagtttagttgtgcggtgggttttagggttttggttagggaattaagggagggagtattagttagggtagggggtcgaggttttgggaagttttgtcgtaggttgtggttggaagtgagaaattttattttttttattcgtttttgaatcggttatttaaggatatttgtattgagaaggttaggtagttttttgttttgggtataggtttttgggtggtagtagggggagtaaatagagttttttggtttaggggttgtaattggtttttttgaataaggatatggggttattggaaagaggattagtcgttttttttcgttaagaaataattaattgttaggtgagggggaatagattttgtttaaggattttgtggattgtgttgttgtgggtgggggtggggtgagggaagggaattttgaggtttgggttgggggaggtggggagaggagttggtagttgaattaagaaaagagttgtaggggtaggtatggtgtggggtggtgtagggtgggattgagggttttttttttttatattttagtgtaaatttttatattttttgtttttatttgtggtgttatttattttgggaggggacgttatttttttattttttttggagttggtttgtttttttatgtttgttttggggttttgggagtagtatttatgggagttttggggtgttaaggattaggagggtagaaggaggcgaaggaaatggtatcgagagagttagggtagagggaggattatggcgggtgatttggtcgggagttgtgtgagttgtttaacggttattaggaattggttcgttttaggatttggttttatttgagtgtttggttttgtttaggttttagtttttagttttgtttttgtttttgttttattttgttttacgttttttttagtttggttttagatagagtttaggaataatttttgtttttgatgtgaaaaatgtttttgttagtttaggtagaatttgttttagagtattggtgtttagtttattataggtttgtgattttttttttttgatttagtgtttattaggtatgaattttagaaatattatcggtagttgtggagttggagagtattgtattttttttaagttgtatggcgagaattattaatagtgtggtagaatttatagttttttttaaggtcgtggtttttttggtttgtagatagtttacgtatttttttatgtttgttgtggattattgggtgttaggtttttttttgatagtgttatggaatggattaattaggatagttttaaaaattttgtatgtggaatttttaattagtttagtgagaatttaggatttagagttttatagtggtatttagtttgtttttttgtaatagattgaaggttttaagtaaattagttggttaatattatgatagataggtttgttgttaagttgtttttttaggaattagatttttagttatcgtggcgtttatatgtaatataattttgtttggttgtagtttagtagcgtgttttattgggttgggtggggcggggatttttgtggagagtagagagttggtggtattgttagtagcggatttttagaagaaagtttatgatattagattgttttttttatagtttttggatgtatttgtatgtattattttggtttatttagtggttgttgttagatagaaaggaaaggttattataggttttgtgtttttttttttttttttttttgagacggagtttcgttttgttgtttaggttggagtgtagtggcgtaatttgggtttattgtaagttttgtttttcgggtttacgttatttttttgttttattttttcgagtagttgggattataggtgttcgttattacgttcggttaattttttgtatttttagtggagacggggttttatcgtattagttagggtggtttcgattttttgatttcgtgattcgttcgttttggttttttaaagtgttgggattataggcgtgagttatcgtattcggtatgttttttttttaatattgtttttttattttattttgtaaggtaggaattattttattggtttgtatttgaggaaattggtttagatggttttatttagtatttattggggaagtgtttgttgggggtagttttaggttggatgtgttcgaaggtttatagttggttgttggtagggtttggagggtttatgtttaggtttatttgatttgaaagtttattttgattttgtttaagtgttgatttttttttgtagatgtattttttattgtgtttttttttattgttttttgtagatgttgttttttatttagagattggaggtttgtggtaattttgtgttaagtatattaaataggtttattggtgttatttttttaatagtaggtagatattatgtttttatgttacgttgtggaatttttaaaatgttttaagcgtttttattattatatttgttatagtgatttgtaattagttattgaagttaattattgtgattgttttgggatattatgagcgatgtttatataagatagtaaatttaatggaaaaatgtgtgtgttgtgattgttttattaattggttattttttcgattttgttttttaggtttttttattttttgaggtataataatattgaaaggaataatttatgcggtaaatggtaaatattattgttttattttaagaagttgttaaagtagtttttagtagttatgtttttgatttatggaggtaagatttttttttagtaaaaagattaggattagttgaagttttatatgattgttagtatttgtttagtaattaagtattttaaaattaaagtatatggttagatatagtggtttacgtttgtaattttagtattttgggaggtcgaggtgggtggattatttgaggttaggagtttaagattagtttggttaatatggtgaaattttatttttattaaaaatataaaaattagttgggtatggtgatgggtatttgtagttttagttatttgggaggttgagtaggagaatggtttgaatttaggaggcggaggttgtagtgagttaaaatcgtggtattgtattttagtttgggtgatagagcgagattttattaagtatatatatagttttttgtatataatgttattgtatatttaatagattataatatagtataaatataatttttatgtataataggaaattaaaaagtttgtgtgatttattttgttgttatggtttggaaataaatttttagtattttcgaggtatgtttgttatttttttttttttttttttgttggtttagaatgattttgttttttgtttttgtttagttttgtatgttgtaggggtttgttttttttggtaggtttgggtattttgtattttttgtaattttggtttttgggatatgatattggtataattggttttaagttttgttggattagtgagttttttttaatattttttgaagtagaattaaaggtttgtgtatatatcgtgtatgtgtgagtttgtatagagatgttagttttttgtagggtgttttgaagggatgttttgttgtgattggattgtgatatagttataggtttagaggtaggagtggtttagaagggagtggttggttttaattttgattatttaggaataggaaggtttttagaaaattatgttttagaaggtaggattgttggagagtggatagttgttagttagttcgttatttggatattattttgtattgggagggaagatggtttttgttatggtgtaagagtttaggaattaggtagtgaggattttttagcggttagtgttttttatatttgcgggttaaagtatttttagatgaggttaaagattttacgttttttattagttgatttttttttatttaagtggaaaaagaatttagaatttttgtaaaagttttaggggagaagggtttttttttttgtattttggtgataaggttatgtatgatttatattttaattgtaatgtgtatatagttaaagttttaattattagaatataagagttttaaattattgttattatagataagcgaaattatgtagtatatggttaaataatttataattaattaatattgaaagttggtcgggcgtagtggtttatgtttgtaatttcggtattttgggaggtcgaggtagggggattatttaaggttaggagtttaagattagtttggcgaatatgatgaaatttcgtttttattaaaaatataaaaaattagttaagcgtggtggtagttatttgtaattttagttatttgtgaggttgaggtaggagaattgtttgaatttgggaggcggaggttgtagtgagttgagattgtgttattgtattttagtttgggcgatagagtaagatttcgttttttaaaaaaaaaaaaaaaaaaaaaaaaagaaaagaaaaaaaattaattatatttttgggaggtggatagagtaatgttttgttatttaggttggagtgtaatggtataatttttgtttgttggaattttcgattgtcgggtttaagtaatttttatgtttttgttttttaagaagttgggattatagacgtgtgttattatgtcgagttaatttttgtatttttagtatagatagggttttattatgttggttaggttggttttgaatatttggttttaagtgattcgattgttttagttttttagagtgttgggattataggtgtgaattatcgtgtttggttttttatttgttaatttaaaagattagtagttatttagaaaaaataataaatgagatttttgtaagataatttaaatgatatattaataataattttttgggaaagtgatattttaattatgtgagtttttgttttaggttatgaattttaaaatggattaaatggattaatttttaataatttatagtagttagttttttttttttttatagtaggtaattttaaattataaataaaatagaatttgaattttggttttgtttatttgtgggaatttaattaagaaagtattggtttttgggtcggtttaaatatagtggatgaggttaggcgtagtggtttatatttgtaattttagtattttgggaggtcgaggcgggcggattatgaggttaagagatcgagattattttggttaatatggtgaaatttcgtttttattaaaaatataaaaattagttaggtatggtggtgtacgtttgtagttttagttattcgggaggttgaggtaggagaattatttgaattcgggagttagaggttatagtgagttgagattatgttattgtattttagtttggcgatagagcgagatttttgttttaaaaaataaaaaataaaattaaaaagaaagaaaattaaatatagtggataatcgtggattttataattgtagaaatgaaggaattaagttaaaaaaatatataaattagaatatttagtgttaaagttgaatgtttttattaaaattcgtgttgatatttaattgttattttaatggtattaagatgtaagatttttttttttttttttttgagatggagtttcgtttttgttgtttaggttggagtgtaatggtataattttagtttattgtaattttcgttttttatgtttaagtgatttttttgttttagttttttgagtagttggaattataggtatatgttattacgtttagttaatttttgtatttttagtagagacggggttttattatattggttaggttggttttgaatttttgattttaggtgatttatttgttttggttttttaaagtgttgggattataggtatgagttatcgtgtttagtcgatgtgggattttttagggttgattagattgaatagattaatgttattgtatggtatgatagaaattagtttagtttttttgtttttttattttttattatgggatgatattgtagttaggtttttataagatgttagtgttatgtttttggattttttagtttttagttttgtgggaaaaatatttattttttttataaattatttagtttgtgttgggtgtggtggtttaagtttgtaattttagtattttgggaggttaaggtgggtggaaggtttgagtttaggagtttgagattagtttgggtaatatggtaaaatttatttttataaaaaaatataaaaattagttggtgtggtcgtgcgggtttgtggttttagttatttaggaggttgaggtgggaggattatttgagtttgggaggtggaggttgtagtgagtcgagattatgttattgtattttagtttgagcgatagagagagattttgtttgaaaaaataataaaataaattatttagtttgtattattttgttatagcggtaggaaacggattaagatatatagattatgttattgtgtttatttatttattgttgtttttgttatttttgatttttaatatagagttttaattagatgagtattttggtttggttttcgtagaaggggtttgtttttagttacggataagaggagattaaggttagtattatttataaggttaaggggttgtagagttttttaaggttagtgtgttgatgggttttttaatattgtattttatttagtggattggtaggattgggtgattgataggaattattgttgtttttatgggaaagttttatggagatgggggttgagggatgttgaagtttagttattatattatagtgagagagattatattattaagtgttagagatttttttgggtattttttgttattgttataggtggtttttatagtaattttttaagagagttttttttattttttttgtatatggttgtttagttgttttagtagtatttgttgaaaagattatttttattgtattgtttttgttttttgtatttatgtgggattattttttggttttttattttgtttaagtggattaatttgtttattttttgttaatgttattttgtttttttaaaattaatttttcgattgattaattttatatatttgtggtgtatattatgtttatatatatatgtatatatatatatatatattgtggaatggataaattaaataatttaataatatgtatattattttatatatatattttgtgtgtatgtgatgagaatgtttaaagttatttttatattattttgaaatatataatatgttgttattaagtttagttattataaggtataatagattttttgaatttattttttttaattgaaattttgtgttttttgattaatatttttttaatttttcgattttttagtttttgataattattagtttattttttatttatgagtttggttttttttatattttatatataagtgagattgtatttgtttttttgtgtttggtttattttatttaatataatgttttttaggtttatttatgttgttataaatgataggattttgttttttaaggttgaatagtattttattttttatatatattatattttttttatttatttatttattgatggatatttaggtggattttatattttggttattgagaataatgttgtagttaggtgtagtgtttcgtgtttataattttagataattgggaagttgagatagtaggatcgtttgaggttaggagttgttttgggtaatatagattttatttttaaaggaaaaaaaaaaaaaaaaagaataatgatgtaatgaatatgggagtgtaaatattttaacgtattgattttatattttttggatatatatttattagtgggattgttggattatgtggtatttttatttttaaaatttttgtagaatttttatatcgttttttataatggttatgttaattattattttgttttgattattatggttttatagaaagtttaagttaggtagtggtggtttttgattttattttttttttatattgtgttggttaggttttttgttttattatataaagtttgaattagtttgttaatatttataaaataatttattgaggttttttattgagattgtatttattttatagattaagttggaaagaatagatatattaatagtattgagtttttttgattatgaatatggaatatttttttatttgtttagttttttgattttttttgttagttttgtagttttgtttatatagattttgtatatatttttttagatttgtatttaagtgttttatttttgggggtgttaatgtaagtggtattgtgttttaaatggtaaattttggattaggtacggtggtttacgtttgtaattttagtattttgggaggttgaggtaggtagaatatgaggttagaagttcgagattagtttggttaatatggtaaaatttcgtttttattaaaaatataaaaattagttgggtatggtggggtatatttgtaattttagttatttaggaggttgaggtaggagaattgtttgaatttgggaggaggaggttgtagtgagttgagatcgcgttattgtattttagtttgggcgatagaataagatttcgttttgaaaaaaaaaaaattaaatggcgaattttatatgtttattgttgatatatagaaaagtgattggtttttatatattaattttatattttgtaattttgttataattgtttgttagttttaggagttttttatgtgtggattttttttgattttttatatagataattatatcgtttgtaaataaagatagttttattttttgttttaaatttgtatattttttagtttttttttttgttttattattttagttaggatttttagtataacgttgaaaagttgtgttgagagggttatttttgttttgttttgattttagtaggtaagtttttagttttttattattaagtgtgatgttagttgtggaagttttgtggatgttgtttattaagttgagtaaggttttttttatttttagtttgttaagagatttttttttttttaattattatgaatgggtgttggatgttgttaattgttttttttgtttttattgatatgattatgtgatttttttttttagttagttgatttaatggattatattaattgattttttaatgttgaagtaattttgtatatttgggataaattttatttaggtatggtgtattgttttttttatatattgtggatttgatttgttagtattttgttgaggatttttgtatttatgtttattagagatattggtttgtggttttttttttttgtgaagtttttatttgattttggtatttggttaacgttggttttatggaattagttagaaagtatttttttatggaatttcggttttatgaaatgagatagaaagtgtttgttttggttttgtagacgttattattaggagttttatattattagttatggttaattttatcgtgttttttaatatcgttgttaatggtgagtttttgggttgtgttttttttaagttgtttgtagataagtttttaaagatagtagaaaattttcgtgttttgagtattggagagaaaggatttgattataaatgtttttttttttatagaattattttagggtttatgtgttagggtggtgattttatacgttataatggtattggtggtaagtttatttacggggagaaatttgatgatgagaattttattttaaagtatataggttttggtattttgtttatggtaaatgttggatttaatataaatgattttcggtttttttttttttttttttttttgagatggagttttaattttgtcgtttaggttggagtgtagtggcgcgattttggtttattgtaattttcgttttttaggtttaagtaatttttttgttttagttttttgagtagttgggattataggtatgcgttattatgtttggttaatatttgtatttttattagagacggggttttattatgttggttaggttggttttgaatttttgattttaggtgatttgtttatttcggttttttaaagtgttgggattacggtatgagttatttagttcgggtaatttttagttttttatttgtattgttaagattgagtggttggatggtaagtttatggtttttggtaaggtgaaagatggtatgaatattgtggaggttatggagtatttcgggtttgggaatggtaagattattaagaagattattatcgttgattgtatataatttgattaagtttgatttgtgttttttttttgagattgagttttatttttgttgttaggttggagtgtaatggcgttatttcggtttattgtaatttttgttttttgagtttaggcgatttttttgttttagtttttcgagtagttgggattataggtatgcgttattatatttggttaattttgtatttttagtagagacggggttttttcgtgttggttaggttggttttgaatttttgattttaggtgattttatttgcgttagttttttaaagtgttggaattataggtgtgagttatcgcgttcggtttgatttgtgttttattttaattattagattattgtttttgtagtttaggagagtattttttatttatttgttcgtagtatttagaatttttgtgtttttattgtagttttttttgggttttatgttttttttgtttttttttatgtttagttggattgtagtattaagtttatgattatgaaattaatattgaataataataataataaaagaaagtatgttttttggaagagattatagaaaattggtataattttttttttaaatgtttgatagaatttattagtaaatttatttggggttgatgttttttgtttttgaatgttattaattatcgatttaatttatttaatatatgtttatttattttattttttaaattaattttttttataagataaggttttattatgttgtttaggttttttttaaatttttgggtttaaattggttttttaaagggttgggattataggtatgagttattgtatttagttttattttatttttagttaaatttgttttgaataataatagatttaattttgggaggtcgaggcggatagattatttgaggtcgggagttcgagattattttggttaatatggcgaaattttatttttattaaaaatataaaaattagtcgagcgtggtgacgggtgtttggaattttagttattggggaggttgaggtagggtaattgtttgaatttaggaggtggaggttgtagtgagttgagatcgcgttattgtattttagtttgggcgatagagcgagattttattttaaaaaaaaataaaaataaaataaataaaaaaatttaataataataataataatagatttaaagagttgtaaagttagaatatagagtttttataaattttagttttttttaatgttaatatttaataaaattttgttaagattaagaaattaagaaattaatattgttataatattattcgttaaattgtagattttatttggattttattagtttttttagggtttattaatgtatttagtttttgggtttttttagtttttttgattatgagttttttagtttttatttgtttttatgattttgaaagttttgaagaatattggatagataatttgtaggatgttttttattttgggtttgtttgatgtttttttatgattagattggggttatgggtttaagggaagaatattatagaggggagtgtttttattatattatttttggggggtaagatgttaatatgattttgattgtttggtagtgtttgttatatttttttattgtaaagttattatttttttttttttatattttagtttttggaagtaagttagtaagtttagtttatatttaaggtgagagaaataaaattttaattttttgggaaagagattttcgtaatatatgttttgaaatttttttgtaaggaagatttgtttttttttttttatttatttatttaattatttttgattaaataaattagtgtggaatgaatatttatttatattttgggttataatttaatattattgtaattttgttgttcggattatttcggttttgtttatagggagtttttttaggttgatttttgtgtttttttgatatgtttttattttttggtggtgagggttgggagatgggtggcggttattttttggtattataagatgttttaggtttattttatattttttttatgttagttttagaattagttgtttttttatggagttttgaatttttttattagagaatgatttattataattaaggtttaggtattgggtgtttattttatttttttaaggaggatatagaggttttaagatttgtgtgaatttatataggtatataaatggtttttattttagtattattttagagttgatttagttgggtatggtggtttatgtttgtaattttagaattttggtaggttgaggtaggcggattatttgaggttaggagtttgagattagtttggttaatatggcgaaatttcgtttttgttgaaaaatataaaaattagttgggtatggtggcgtatgtttgtaattttagttatttgggagtttgagataggagaattgtttgagtcggggaggtagaggttgtagtgagttgagattatgttattgtattttagtttgggcgatagagtaagatttcgttttaaaaaaagaaaaaaaaaaaaaaaaagagaaagaaaaaaagagttgatttagtttagattttgattttttcgagttgatgagtaattttttatgtaggtttttattttttaaagtttttgttttttagtatgtagggtttaggtattagtaattttattttttaatatttggagatttttttaaaataaatattttatattttggtaatatgatttatttagagaattgattagaatagataagaggaagaagtcggtggagggaggaggtatattgtttttttttgtggagtattttttaatttttgttgttttttttatatttttgggtttgggagaaggatggtatttttggattatgatagaaaaatggtgatttggaaatatttgttttttttgtttttttatttttttattttagtgtttatttttttttttaatttatggtttatgagttttttttttttttagttttttatttagtgttggttttttagagggaagtgaattattattttttggagggtggaattggggagagagaggttagagtttggggttggggtagaagttgtagtaggaaggaaggaggttagagagatagatgaggggtgagatgtgagtgtttagagggagaatgaggatatttttagtatttttatagaggagggaggaaggggttttgggtgttggggtagagaggggggtaggatttggatgggacgttttatttttagtttttggttttttgataatattttatttagttatattgaggggtttttttaggtttaggagtatttgtaggtaggtgtattttaggttttttttgggagggttttttatagttgtttagttttgatatgttttatttttttgggtttggtttttttgagttttgagtttagagttggttttttttttttttgtagttaggttagagtgatgttggtaagtgagaagttaggtgttttatatggtaaggtgtggttgtttttagggttttttttgttagggattataattttggggaagtcggggaggtatcggatgtaggagatagagaatagagaggtggagtgagagtgggatatattttagttttttttttttttttagtttttttttatatgttagtgtttttttttttttaattttagtatttttaatagttatagtaggaaggggagatttaaatttttattattttttgttatagtttttgtgagtgtggttatttttatttttattgtagttttagggtttgttttagagtagagttttgggtatgtttagagcgggatattggaaggttttttttttaaatatttgtatggttgtgttttttttttttaagtttgtttatatggtttttttaagaggtttattttgattatttgtttcggttttttaaagtgttgggattataggcgtgagttattacgttcggttattgttttggtttaatttgattaggaatttttttttatttttttttttttgattttttaggtttaagggatatatatttaggtttgttatatgggtaaattgtgtattacgggtgtttggtgtgtagataattttgttatttaggtaattagtataatatttaataggtagttttttaattttttttttttttttattttttatttttaaggaggttttagtgtttattgtttttttttttgtgtttatgtgtatttaatgtttagttgttatttataggtgagaatatgtggtatttggttttttgtttttatattaatttgtttagaataatggtttttatttttatttatgttgttgtgaaggatatgatttcgtttttgttttttggttgggtagcgtattatggtgtataagtgttgtagtttttttttttttttttttttttttttttttgagacggagttttattttgttatttaggttggagtgtagtggcgtgatttcggtttattgtaaattttattttttgggtttatgttatttttttgttttagtttttcgagtagttgggattataggtgttcgttattatattcggttaattttttgtatttttagtagagacggggttttattgtgttagttaggatggtttcgaatttttgatttcgtgatttgttcgttttatttttttaaagtgttgggattataggcgtgagttattacgtttggttttgtgtcgtagttttttttatttattttattgttgatgggtatttgggttgattttttatttttgttattgtgaatagtgttgtattgattataaatttttaaaagtggagataattgaagaaatgtaggttaggtgtagtgttagattttatttatagtgatttttatatttagtgaaatatgattgtttttttttaaattattgaattaagtgttaaaatgtattaaaagatttaaagtttaaatatttttttatttttgggatttataatttggttaagatatttaatttgtttatagtatattgatggatatagtttattattttttttatttattttatatttaattattaatagtgatttttttattttgtttttttattatttgttttttaattggttttagaattaatattatttatagttgataaagtgagttgtttagttttttgtattttgttttatttttttgaatattttaaataagtttaataattttttttgaaggtttagtaggatttttttgtgaaataatttgtatatagttgggtagagatagaatttttataattgttttaattttttatttgtagtaagttttttttatcgatatttttttttttataattttaagattgtttatatttttattatagttgtagtggtatatttatttgttataatattgttttgtttttaattaatattgtttgttttttttttttgtttaaagaaatagttgtttttggtaggttgggtttttagtagtggtagttgttaggttagttttggtgagtggtgatttaattgttttgtttatgtagtgtttattttagttattacggttattttgtgtagggatttatgagtaagttttgtgcggttgagtggtattatttattaagttatttcgtttatttggttatagggagttttagttttttggagattttttggtaggtatttatatgtaatttttatttttatatgttttttttatggaaagtggttagtgtatattttttttttttattttttaattttttaattttattttttttaagttttagattggttaggtaatttatgagttattgtttttgatttatttatttatgtattattggggtataatttttattttttattttttgtggttttgtttgggttttgatttttagtttttggttcgatagttttttttaaagttgttttggtgttagtttttaagtttattgtttttgtagatttttttttttatatttgagttacgggtatttattttttggaattaaaaaaaaaatttattggtatttttaatgtagtatttttaaggatttggagtaggagaaattttatattagtttagagagaattgttttaaaatattagaaatgtaaatttgaatgaaggataatatgtatggagaaaggtggataaattataggtgggtagtgggttttgtttaagtaaaaatttagataaataatatttttattaagtaatattatttttattttttaagaaatatcgttgagttataaattagttttttttattttagagtagttattgttttgatttttaatattgtagatgagttttgttggttttgattgaatgaaattagaagttgtttttatgtagtcgggtttattatttttgttgggtttattattttgttgtgtgtggttatagtcgatttttttttatggtcgttaagtgttttattttatttatttatttattttgagacggagttttatttttgatgtttaggttggagtgtaatggcgttatttcggtttattgtaattttcgttttttcggtttaagtaatttttttattttcgtttttcgagtagttgggattataggtatgcgttattattttcggttaattttgtgtttttagtagagatatagtttttttatgttggttaggatggttttgaattttcgattttaggtgatttattagtttcggttttttaaagtgttgggattataggcgtaagttatcgtatttagttaagggtaaattttttattttagaaattatttagttagtgaatggggaaggaatgagagattgagattataatttttttgtaatttataacgaattaatagatttagttattgaaaagtaatggtaattaaaagtagagtaaaagtaaataattagtattaagtttttttttttgatggaagaatataatggagtgttataaatgaagtatttaagaagaaaattaagttagtttataagtaaatttttgtagttaattattaatttatagaaagtatagataaaataggtttatattaaattatgttttggggtggagttagtaaaatgtaaattatggaaaatttagttagataataaaattttaaggaggagtatagagaaaaaaagagaataggttaggtgcggtggtttacgtttgtaattttagtattttgggaggtcgaggtaggtagattatgaggttaggagattgagattattttggttaatatggtgaaattttgtttttattaaaaatataaaaaaattagtcgggcgtggtggtagacgtttgtagttttagttattcgggaggttgaggtaggagaatcgtatgaattcgtgaggcggagtttgtagtgagtcgagattatgttattgtattttagtttgggtgatagagtgagatttcgttttaaaaaaaaaaaagaaaaaagagaataaaaattatatattttaaggtaaaattaaattataattttagaggatgaaaatataaaatagaataaagaagtaattattataaaggttaggttgtgattttatgtggggaagggaagtttttattattgagttggggtaaatgatggtttttgggttggttgataaatttttatatttttggtggttaaagggtgtttattttttattattattatttattattattattaaagggtaatatttttagatagtttttttttttgggtatttgttttattttatggtaaaaagttaatgaagaataaaataatttataggttatgattattgttttgtagaaagtttattttttatatttttttttagatattgagtttttaaaataagtggtagtattaggattttttggtagggttattttatttttgggtgtgtttatgttattggaggtaatgttttaggtttattttttgatgtttggaagaatttgataggagatagttgaggggaagttttttttgttatttgtaggtttttggttgttattgtagagggagcgggtttttattttttttataggtcggattatagttagaattttttttttgtatggggagtgaggtttgattttttttttgaatatagtgatagagatttttgtgttattatatgaaggttttaattttttagggtagatgtttttttatagagttagtttttgaatattggcgttagatgttttatttttatttttttttagttttttttgttttgttgtgaatttgttagttattgggaattagtagggaaagggaataaggaggggagattgttttgatgttgggttaaggtattgagatagatttttttttttttttgaattttatattttattcgtttttagacgtatgaaataaaatatagattagaaatgtttatttaaagagtaaatatttacggtataaattatgtatatataatagtagatatagagtaatgtataacggtgtgacggggcgaggggattttaaggtgataagaaagttggttttgggttggttaggaggagttattattaagatatttatttataaagtttatttatgataatttaattattgtatatgtaatatattaaaatatattaaaatataagaaaataggataggtatggtggttaatataataaaatatattataatataataaaataggttaggtacggtggtttatttttgtaattttagtattttgggatgttaaggtaggtagattatttgaggttaggagtttgaaattgggttggttaatttggcgaaatttcgtttttataaaaaatataaaaattagttgggtgtggtggtgtttgtttgtaattttagttattcgggagtttgaggtacgagaagtgtttgaatttgggaggtagaggttgtagtgagttgagattatattagtgaattgtagtttgggtgatagagtgagattttgttttaaaaataaaaataaaaataaaaataaaaataatagaaataatgatattaattaatatggtattgttaagggttttataattttgtattggattgaataaagggcgaacgtgggaataaagagaaagataaaagagtatatttggaataaggggttagggggttttttgtttttcgtgaataagggttttgattttttatagtttttcgtatttattggtataggagatagtaagaagaggggtggaagaaggagttagttgttgggtttagagtaggtttgtaagattgtattttttaaataataggttttagatgatttagtagataattttaatgagtattatggagtgaatgtttttagtaaattttttgttggtaggagtagtcgtgagtttgtttatattttgtatttatgataaataatttgttgtttgattatatagtttttaatggaatgttgagttggttatgatttttttgttggttttttacgtggtagagtagtaaatattttatatttattaatattttgtagtatttaataataataaataagtgatgttattttttgttttataggttaggaaatagagggaaagtgttggtgagatttaggtagggagttgaattttggtcgtttggttgtagagtttaggcgtttttagtggaattagtggatttagtagttgatattagaggttgaaattttagttgtgttgtatttttgtggttttttgttttaattgggtgttgatttaggatttgtaggtttataagttttggagaagagggaaacgggtaaatgttttattgggtgtagtgttgtgtttattttttaaggatttttttttttttagttgttttaaaattagatttattttttttttgagagaagatgaggtttttatttttttttttttttttttttgttttttttagtttttgttagtttttttttattattttattaatattagtttttgttttgtgtttattatttatcgtgtagggagtgaaagggttttaagataaaaggataagatttaagagggaatttagtgttttttttttaggtttgattagttttgttatagtgagaggtttttttaaagagaggttttgatttttgtttttagtttttaggttttttttttttgtagaggtatttgtatattagggtaggttttgtttattgtgggttttgttttttatttgtagtttagtatttttttttttttagttttgagtaggtagtttttaattggggattttattaggaagtttggggggtttagtaggtttagtatggaaagatatggttgttataggatttgtatttgatatgattttgggattttttattttgttcgaggaggtttggttttttatgatttttagtatttatttaggtttgtgatttgttgttgagttattattgtttttgtttggtttatttatttttggtttatttattttattttagggttgttgtttggtgaggttgcgaggtttttttgttttgtttttagtagggattttatttaggttattgtttttgtaatttataaggatttttttttacgtggagtaggggagattttttagtttgaggttgtttttgtttattttttgtatttgggaattgtcgttgttatagttattatttttatatagatttttttggagagggggttttaaatttgagtttttgttttatttaatatgttttataatagtagtattagaggaaattttattaagattatagagttgaaattacgaatatttttattggatattaatattgaaagtaggaattttgataaattggtatatgaattttatattttttttttggttaaaattttagtgatttacgaggaaattatttttgtttatagggaattagaagtgataatttttttacgggagacgtcgtaggtgagagtaggagtgattatagatttgtattgtttttgttgtgggtgttttttggatagggtttttttgttgtagggtaggggacgaatttttttatttgtttaggtatgaggggtcgattgatagtgtaattaggtttaaggatgagaaattagcgtttttatcgttagatttaggttttttggatattttagttttttattgttttttgtattgtttttgtttttgtagaaatataaaatttttgttgtttttttttattttttattaaataatttgattgtgggggaaatgtttttgatcgttttttattttaaatttattaggtagtgattattttgagaaagggaaattggtttagggagggtaaggtaaggttatagagtatagaataaagttttaaagagatggcgtttggggattgtgttttttagggattgtagaagaaaatacgttggaggtaggatgaaaatagggattataattgttttgatgaggggttgggtttcgttttttaaatggtttagggatatttgtttatttatttatttgtgttatttgtaaggaaatttagggaggttaggtggtgggaatttggaaagtgttttttggaggaggtatacgggtgggtatcgtttttttttggatttttttttagtttttggttttttttagattatagttatttttattattttttttttttgatattatgattatttaggtttttagtaattagtacgtgatttttaatttattttatttggacgtattttagtgagttcgagagatagagaggttgggatggggatagagtaggtgttatagttttttttgttgtttattttttatttgtagtaggaggaggttatagttggatattcgaaggttttgttttagttttggtttgagaagtatttatgggtgtagatggagatgtagtttttattttttttttaaatattttagtttttattttttgttttagtagttttgttatttacgttttgtttgggtaggagtaatgaggagattttattgtttagaaaggagtttttttatttttagaaattgttttttttttttatttggattttttgtcgttgatgttttttttttgtaataagggatatagagaataataataataataaaatatggtatagtagtagaaatatatggaaagtttgttcgttgattttgaagtattagcgttttttttgaaaaaaagggatttgttatatattgggtagagagttatagtcgtttttgttgtttttattttggtttgattttttttagggttattttaggtttattagagggtatagggtgagtgtcgtgattttcgttgtgttttatgtagtaggtgaatttttgtttttttttttggcgaattttggtggttatttaggtttggtaggttttatttttattaggtaggatatttttttattgttgggtgttgtggtttaaagatattttattttgacgttaggttagtgtgatatttcggggatagaagttggaagttttgtatgttacggtgatgttgttttttgagatttcgttgtaggtgatatttattatggggggtattggagaagaaagggtagagttagtgaagttttgtttttttttaagggagatgtagggaatagggttgtttttttttattgtttttattttggttgaattttttatagattttagattttttgtaagtttgtttttattttggggtttaatttttttaggttagtaggaggatgggttttgggattgtggttttaggttttgggatttttatattgatgttgaggagggggatgttaagggtggatttttgggttatggggttaggagggaatttttcgggatgggtaggtcgggaggtagagggggtagttttggttttgagggtttttttttttgtttaatttttattttaggtttaggtttttgttagagggtttattgtttttttagattataatattggatagtttagttttagatttattgtttttatttaatggttttaataggagaggtaaattaggatataatatgttaataggaaacgtttgtatttatagtatagggagggtttttttggatagagttgggaggcgaggtaattttagtagaattgcgggaatagtagagtttttggttagggtcggtatttgtttttttgatggttatttcggattttagatatcgttgtagtttttgtaggtagtttgtttgtatagcgcgatagtgtgttttggtttttatggtattttttttttagaaatttgtgacgtttatagttaaggtttgagttttggaggattggggtattgtcgatttttgagtttttaggttttgggagaggaagagttttttattgtagtagaaatgtcgggagtttttggtgttgttgtttttatggattttatagattttaattttttggagggaatgtaagtttgtttttatttagtagtgatttttttattttcgaatttattatttttttatttaagtgaggaatttagtttagcggcgatttttttttggtttttttttatgtttttttgtgtgggttgagtttcggtttattattttgttgagtttttttgattttattttttatttttatttttagttagatttagcgggaagagataggtttttgttttttgtttttaatttttttggagaaggttttttattatttttgtttttgtcgatttttattttttttttggtttttgatatgagttagggtttttttgaggttttgtttattttttgttaagttttcggtttttgtgttttaggttttagtttttaggatattttttgtttattgtttttggggttttgttttgcgtttttgtttgttatagcgtaggaagggttgattatttagatgttttttagcgagaaattttgattgtatagatttattttgggatagtattatgaggttgtaacgaagattgtggggttttggggaagaggaaattataggtgaaatttttttttggaaataattttatattgatgtttaatatataggtttgttgtttcgatttttttgaggaggtaggaaatgtatatgggtaaaaggataagaacgaagattttatatataaggaaaattgtgagggtgggaggatagaggagggggttgatgaatagaagaagggggaatgaagatggtaaatttgtaggttaggtgttaggattgggtggttataagttttttaagggaataggggttaaggggagaggttgttttgtaggggtaagggaggagtatgaaggtagtgttggaaggaaggttttgttagaggggatagtgggaatgggaagggatttaggtttagagggatttatgtttagtgtggttgtggtgtataggtgagggtgagatggaggtaaggcgagttgttttgagaaaagatttattatgggtatggtggggataagggagggggtggttatgaggtataaggggtaggaaggttgtagttttagagaagtttatagtggggttagtattttagaggggagtaatgatgtgggtttgggtttaaagtggaagagtggtatgataaggttttaggatagtaattggatggattagttagtgtttattggggtgggtaggtgatagggtattaaagagtaagtttatttttttagtaaatagtgttgggggaattggatgtttaaataatataaaattggatttttaatttgtattatatataaaaattaatttaaaatgaattaaagatttaaattttaaatttaagaattaaaatataaaaatattttagaaaaaaatattgggtataatgtttatgatatagggtttgatagtgtttttatggatatgacgttaaagtatagatagaatagaaagaattgataaattggatttatgaaaaatttaaaatatttgtgtattaaagggtataattagagtgagaaagtaattaatttttgaaatgaaataaatattgtaagttatatatttgataagagattagtttttagaaggttaggcgtggtggtttaagtttgtaattttagtattttgggaggtcgaggcgggtgtattattaggttaggagattgagattattttggttaatatggtgaaattttatttttattaaaaatataaaaaattagtcgggtgtggtggcgggcgtttgtagttttagttattagggaggttgaggtgggagaatggtatgaagttagcgggtggagtttgtagtgagttgagatcgtgttattgtattttagtttgggtaatagagtaagattttattttaaaaaaaaaaaaaaaaaaaaaaaagaaaaagagagagattagtttttagaatatgtaaaaaagtttgataaaaataataaaatagttaatttatttaaaaatgggtaaaatagttatgagaagttatgtgggggagaaaaatgggtaagattttaatggttaattttttaaagaaaatatataaatgattaataaatatatgaaaagatgtttaatattagtatttattaggaaaatgtaaatttaaattataatgagatattattttaaattaattagggtggttattattatatatatatatatatatatatatatatatatatatatatatataaatagtaagtttggtaaggaggtagagaaattgaagtttttgtatattgtttttagaaatataaaatggtacgtttgtaatggaaaatattatggtgatttttttaaaaattaaaaaatgaaatatcgtatgatttaataattttatttttggatatatatttaaaagaaatatttaaaagaaataaatatatatttaagagaaatgaaatatttgttaatatttaaaaggtagaagtaatttaagtgtttattgtttgaggaatggataattaaggtgtggtatatatatataatgagtattatttattattaaaaggaatgaaaatttgatttatattataatttggatgaatttcgaaatattataagtgaaataagttagaattaaaaagataaatattatacgattttatttaaatgaggtatttagagtggttaaatttatagaaataaaaagtagaatgatggttattaggggttagaggtagggaggaatggggagttatcgattaatgggtatagagttttgggttgtataaaaatgtgaatgtatttaatgttatcgagtatatatttaaaagcggttaaaatagtaaaatttatgtaatgtataatttattataattaaacgtttaaagaataagaaatattagttttatttaaattgttttgaaaaatagaggaggagggaatatttttaaatttattttataaagttaggaatattttgatattaaaattaggtaaagatatattaaaaaaagaaaattataggtttatatttttgatgaatattgaggtaaatattattaatgaaatattagtaaattatatttaatagtatattaaaaagattattttttatgattaagtggaatgtattttaggtatgtatatataaattaattaatgtaatatatcgtattaatagaataaaggataaaagttatattattattttaattgatattgaaaaagtatttgataagtttaatatttttttatgataaaaattttaaaaaaattgagtatataaggaatagattttaatataataaaagttatatatgataatttatagttagtaatatattgaatgggggaaaattgaaagttttttttttaagatttggaataagataaggatgattatttttattatagttatgtaatataatattgtaagttttagttagagtaatttgataggagaaggaaataaagggtattaaaattggaaaagaagaagttaaattatttttgtttgtatattatgtggtttgatatttggaaaatttaaagattttattaaaaaattattagaattgaagaataaatttagtaaagttgtaggatataaaattaatatgtaaaaattaatagtatttttatgtgttaatagtaaataatttgaaaaagaaattaagaaacgaattttatttttattagttataaataaaataaaatatttaggaatagatttaattgaagaagtgaaagatttttttaataaaaattataaagtattgatgtaaaatattgaagaggatataaaaaatggaaaaggtattttatgtttatggattggaagaattaatgtttatttttattttttgagatggagttttgtttttgttgtttaggttggagtgtaatggtgtaattttagtttattataatttttgttttttgggtttaagcgatttttttgttttagtttttttgagtagttgggattataggtatatgttattacgtttggttaattttgtatttttagtagaggcggggtttttttatgttgattaggttggttttgaatttttgattttaagtgatttatttgattcggttttttaaagtgttgggattataggagtgagttatcgtgtttagtcggaagaattaattttgttaaaatatttattttatttaaagtaatttataaatttaatgtaattgttattaaaatattaatgatattttttatagaaatagaaaaataattttaaaatgtatatggaattataaaaaatttagaatagataaagttattttgaataaaaagaataaaattagaggaattatattatttgattttaaattatattatagagttagagtaattaaaatagtacggtagtggtataaaaatagatatacggattaatgaaatagaatagagaatttagaaataaatttatatatttatagtgaagttatttttaataaagttattaagaatatatatagggtaaaggagagtttttttaataaatggtgttggggaaattagatatttttatgtagaagaatgaaattggattttattttttattatatataaaaatttaattaaaaaggattaaagatgtaaatttatgattttaaattatgaaaattataaaagaaaatattggggaaattttttaagatattggattggtaaagattttttaagtaatattttataagtataggtaattaaagtaaaaatgtataaatgggattatattaagttaaaaagtttttgtatagtaaaggaaataataaataaagtgaagagattatttaagaatgggagaaaatatttttaaattatttatttgataaaggattagtaattaaaatatataaggattttaaataattttataggaaaaatatttaataatttaatttaaaaatgagtaaaagatttgaatagttattttttaaaagaagatatataaatggtaaataggtatattaaaaggtgtttaatattattcgttattagatgaaggtaaattaaaatttttacgagatattattttattttagataaattggtttttatttagaagataggtaataaggaattttggcgaggatgtagtaaaagagaatttttgtatattgttggtgggaacgtaaattagtataattattgtgggaaataatgtggaggtttttttaaaaattaaaaatataatagagttgttatatgttttagtatttttattgttaggtatatatttaaaagaaaggaaatcggtatattaaagagttatttatttttttatgtttattgtagtattatttaaaatagttaagatttgtaagcgatttaagtgtttattaatagacgaatggagaaagaaaatgtggtgtatacgtgtatgtggagtattatttagttattatgttatttgtaaagaattggaggttattatgtgaagtgaaataagttttaggtttagagagataaatttcgtatgtttttatttatttgtggtagttaaaaattaaaataatggattttatggggagagataatagaatgacgattattagaggttgagaagggtagtggggagtgggggagtgcggatggttaatgggtataaaaatatagttagaatgaataagatttagtagatagtatagtagggtgagtatagttaataataatttattgtatatttaaaaataattgaaagagtataatgggattgtttgtagtataaagaaaggataaatgtttgttgtgatagataatttatttattttgatgtgattatgatatattgtaggtttgtgttaaaatattttatgtattttataaatatatatatatatatttattacgtatttaaataaaagttaaaaattaaaaataaagtaaggagtgggggtgttggttagagagagaaaattaaggtagagggggagatttttagtttgaggaaggatttgttaaaaggagtaatgttggagggggagtagtggtattttaagagtaggtaaaatagattttagatatgcggtgtggggagtgagagtttattggggttaaggaattaaaagaaaagaaggaaggttaaggaatagttggtttaatagtttgttttaggtttgggttggggaggggagatgggtagagtaagaattggagggcggtatgagtatggggtaggagtgattgtgggagaatttggggtagggtgaggataggaggggagggtgttttgggggagggtggggtttgggaaagatttttagtattgttatatgttttagtatttttatttttttattgaaagatgagaatttgttgagggttttaggtagttgggtaagagataggagtagtataaggttttaaggtggagaggggcggagggattagggagggatggtttagtatttgtgggttggagggtggggtttttaagagggtgaggttgaggatgaaggagtggggaaggggttataatgaggtagggtttagagtaggtatttgtattggaggggagggggtatttgcgttgttttgcgttttgtttaaggtttaattgttattagtattagggttttttttaggggtttggaggggagtgggatggagggaagattttttcggataaaaggtagtattagaaagttagagttagggatatttgggaatggggaggtataggggtagtacggagtgaaggttgtttgtaggaaaggtttataaaggaggtaggagggatttttagtggcgggggcgggggatgaaggtagaggatattttagaaatggattagagaatagtatataggaaggggtagtagggagttgggagagtaaaaggatttagggcgtcgtaagatgggtagggaggaggtgagagggaatttggtgtttttagattattggttattagtaggggtgggatgcgagagaggagaggattttcggagtcggaggcgaggggagaatgagttggggatgatagaagtcgtaggaagaattttttgttcggagtttgtagattttaattttttagtttgagagttaggattttttatagtttttatagtagtaagaagtattattttcgggttttaagaaaggagggttttaattttaggagttgcggtttaggagttgagaatatatcggtttcgggagaggataggattttagggatttgagattcgtttttagtatcgggggaagtggttgttttagcggtcgcgttggaacggttttttaatgttatttataggagtagttcgggaatttaggggttttagaaggattggtttgttcgaaaagtgagaggagacggaggagaggcgaggagagtaagtgtaggaggagattagaaaatgcgggtgatgcgcgatttcgaggaggattgaaaggagacgggaggtcgggcgcggtggtttacgtttgtaattttagtattttgggaggtcgaggcgggcggattacgaggttaggagatcgagattattttgattaatacggtgaaattttatttttattaaaaatataaaaaattagtcgggcgtggtggcgggcgtttgtagttttagttattagggaggttgaggtaggagaatggcgtgaattcgggaggcggagtttgtagtgagttaatatcgcgttattgtattatagtttaggcgatagagatttcgttttagaaagaaaaaaaaaaaaaaaaaaaaaagagacgggagatgggaaagtagggttgaggtgtggcgggaataggcggcgtttagttttttgtattttagatagtatatttgagtttcgttttgatcgtatagcgttcgcggtaatttattcggattttcggaaacgtttcgtcgttttcgtttcgtcggggatcgttaggaattttatttattagcggcggttgtcgggggtgtaaaagggaaggcgacggttagaaatagtaggattcggtttagttttatggtttttacgtcgttatttttttagttgtttagtagtggttaattgaatgaaatcggtgagaagatttcgtcgaaatttagttatttgcgtttcgtttagcgatcgtttatttagtgaaaattgaggttcggaatttggttaattatgagtggagagggcggggttacgtttagaagagaaaattttagcggtttggagatttggggaaatttagaaggcgggatttggcggttagaaaagggggagcgtgcgcgagcgtagttaaaattaaggattagtttcgagtagttgagagtatagttttaaatttatgagtacgatttggattttgtcgttttttttgtatcgcgattattttattttcgtatttttatttttaaggagcgcgggttttattaagtttttttcggcggtttttttattaggtcggtttttattggtttgtttttttcgggatagataacgcgtggtttttttgttaatatatttttttaatcgcgtatagcgttattgtaatgagattagtgattagatttgtagatttgtttttagattttagtcgtttttgttttttagaagtatttgttttagtagaaacgtttagattataaatttttttagacgttttagttatataatttttttttttttttttcgatttaaagttaggtttttttttttatttttttatattttttaagtgtttgaggttttttagggttttttttttatttagtttttgggtaattatagggttaacgaggcggttttttatggtttattataatattaagttttttttagatttttttttttagtttgttttaggatatttgtatttttgggattatagttttttttaatgtgatagatttataaggattttttatacgttttttattatattattttttttttttttttagttttttttaagaattttattatttttggttttttttgatttttttttttttttttattttcgggagttaaagttagtttttttaacgttattttaattttatagttatagttttagtttaggtttttttttttttttagtttggattattgtataggttttttaaatattgtgtttgttttagttataattagagtgttttaagttatttatagcgttttatttgttgaatgttatatatggtagatgtttttattttattatggaaattatagtttttataatttattgtttggtattatttttatttttttggtgatatttttttagggttgtagtaaacgtgggttttgggatttttttattttattttattaggatgttattgtttaagtagttttttttttttaggttattgttatttttgttttggaatttattagattatagtatatttttaaaatttttttaattaggttggtttgagtgtagtggtgtttataattaattgattataattagttatagatgtttttgttttatttttatttttattgttttatttgattagtttttaaaaaaaaaaaaaaggaaaaagggttcgggtacggtggtttacgtttgtaattttagtattttgggaggtcgaggtgggtagattacgaggttaggagatggagagtattttgttaatatagtgaaatttcgtttttattaaaaatataaaaaatttagttgggcgtggtggcgggtatttgtagttttagttgtttagaaggttgaggtaggagaatggggttaattcgggaggcggagtttgtagtgagttgagattgcgttattgtattttagtttgggtaatagagtaaggtttcgttttaaaaaaaaaaaaaaagaaaaaaaggaagaaaatttttttaagtagatagtggtgacggtggtataattttgtgattatgttagaagttattgatttgtatattttaaaacgataaattatgtgtggtatatgaatttttaatttttaataataagaattttgtttggaaagtttttattaagagaattggtttgtttttagcgtatatttttagttattgggatatttaggtagtggtttttaaatttagttattgcgtagaattatttggagagtttttaatatttatgtttttaggttatagttataattagttaaattagtaaatttaggttggatttaaattttagtattttttaaagttttttgcgtgatttcgatgtgtagttaagttttagaattattgatttagtttatggtttgaatttttttgatggtatcgattgtgttttgttttgaattttattttttttatttattttattttatttttttaagagaggagttttgttgtgttatttagttggaatgtagtggcgtgattatagtttattgtagttttaaatgtttgggtttaagtagtttttttattatagttttttgagtagttgggattataggcgaggcgagtgttatatatttagttattatttattattttttattttttttttttattagattatgaattttttaggattaggaattgtgtttattttttttttgttggttttataatttttttttttaagtttaattatttttgttattattaattatttttttattatttttagtttatatttttttgtggatgaaaatgtaatgtattcgagaattttaataattttttagtttttttatatatatttattgataatttattttgatttttataatttattaagtatagtagggattggggttttgtttttattttagagagattatttttattgttaaagattataagtatagtttgagatagagagggagatggatttagtttttttgatataggttttaagtttttttttttacggtgtttattttttttttaggatttttttcgtgtgttagttttagtaaagggttttatttagttcgtttttaaaaaagatttttaatagtttaataataataatgaatatttaaggtttgttttaaggtatttagaagcggttttagggagatatgaagttagtttttttttgggttaggggaggttaagaaggttttgagttttaggggagttgttttttagcgtcgaggtttgggtttttttttttattaagttttttaggttttttgtttaaagttttttttttttattttatttttagttttttttgttttgttttattaattatgtttttttttttagtatttgttttagatttttggatttacgagtatagaggcgatttttttttcgtagattttaggcgttattgtagggttcggaaaagaaagagaaacggtttagcgcgggcgtttataaaatttagggcggggttgttttcggcgttcgaaagttttttgttttttgtttttttttgaaacggagtttcgtttttgttgtttaggttggagtgtagtggcgcgatttcggtttatagtaattttcgtttttcgggtttaagtgagttttttgttttagtttttcgattagttgggattataggtatgcgttattttcggttaattttgtatttttagtagaggcggggtttttttatgttggttaggttggtttggaaatttcgattttaggtgattcgttcgtttcggttttttaaagtgttggaattataggtttgagttatcgcgtacggttttgttagtaagcgttttgaattttgtggttcggaatttattgcgaggattgggattatttattatttttttttggttttcgaaaaatgaaacgtgtttattgatatagaaacggaataacggtattttgggttggggagggtcgagttgttttaggtttttggtttttagttgcgcggtatttatatttgtcgttgtgaaaatgtagattcgcggggtaggaatttcgagtttaggttggagcgcgatttggaatttgattcgttggaaatagtatcgcggtggattcggatttgagtgagtagggaattgcgttttagtttttttcgtaggtcgtttatagattttagggttcgaaaacgttttatttttggaaggtagcgttcgtttttgggcggttttgatggaaacggattttatcgttcgtaggaaaatttataattaaggggttaggaaaaagttttttagggtttcgtcgttttagtgaggattttaatttatatttcgagtgtggtttcgttaaagacgggagtgattattgaaatgataaaagatttgcgcggtttagggcgttggggcgtatagaatgttgtgatagcgtcgtttcgcgttttttttttgatttgttttaggcggacgcggtgaagtgtgttggtttgggggttggaatatatcggggattaagtgtagagagtggtgaaaggagggaaggataggggaacgtgttaagaaaggagggaagagataggaagaaaaggggagagaaaaagtaaaggagagataaaatttaaaagacgtagttttattatttatttttgatttttatttagttttatttatgaatatttttattatagttttttttttttttgaatttgtaaatatattgttattattgttattttagagtttgtgagggtaagttgtagatagtatgattttttatttttagatgagttagggtgtgttttttgggtataagaatagggtttttgttttgttttgttttatataagtaaagtataaattttaaagacgataatatttttaaattattatattgggatatattttgtatgtaataaattgtatttatttaaagtgtttaatttgttgaattttagttgttgtatatatttatatttttattattatagtgaagataaagaatattttaattgttttttaaagaagagttatattataaaattttatatagttattaaaaagagtaagatcgtttttaagtattgttatgaaaagaagtgtttagtatatttttaattttttttaaaaggttaaggaggttgggtttagtggtttacgtttgtaattttagaattttggaaggttaaggtgggtagattatttgaggttaggagttcgagattagtttggttaatatggtgaaattttgtttttattgaaaatataaaaattagttaggtatggtggtcggcgtttgtagttttagttattcgggaggttgaggtaggaggattgtttgaattcgggaggtggaggttgtagtgagttgagatcgtgttattgtattttagtttgggtgaaaatgtcgttaatattatttatataatattaatatatattttaagtaggggaaaatttggaagattttttattaaagttttgatagtgattttagagattgggataattttgtgatttttattttttttgaaatgttggaattttattttttagtataaatttggatttgggtgagttgtagtggtttatgtttataattttagttttttgggaattggaggtaggaggatcgtttgagttagggagttttaggttgtagtgagttatgattgtgttattgtaatttagtttgggtgataggaggagattttgtttttaaaataaaaataaataaaattttaaaataataaaaattgtgaatttggatttatgcggacgttaaggaagagaatattttaatttgaaaatacgaagttaagttttatattaaaatggttatagagttttaaaaattaaaacgttttttaaaatttagtattagaaatttttttaagaggattttttatatttttatgttattgaattttttttaaagtgtatttgaaagagatgtttttagtggaatagagagatatgtaataatatttataaaagcggttggttgtaataaaaaggaaaacgtaaatgagtggggatataggggattttgttttatttatttttaaagtacgtttgaaaattgcgttgttatagcgtttttgggtggagataaagtcgaggtagattttgtttttggagtattgatttgattttggaaacggtttaaggtttttagaaattaggttgatttagatttaaagttttaagaatgttcgttttagtagtgagtttgtgagaatttagtttatttgggcgatgttttttttgtttttatttagtggtagtggttggaaggatagggtatagtgttattgtatgggtggggttgaagttaaggtgaaatcgtttttgtaaaattataagtaaggaaatgatgatagtgaaagatattaaatttaatttattttattttgtttttaatcgttaatttgtttttgtttatttttgggtataggtcgtattagttttgggaaggaatttatagtttaaagggaaagtgtttttttaaaacgaatgaaacgtcgttagttattaagttaggatgagaggggttggaattttgaatattattagttattatttcggaggttataagatttgtaatttttttagttatttttgaaggtaatattattattgtgaattttagagcggttttttgagatgttttttgtattttttttttttttttttttttttttttttttttttttgagacggagtttcgttttgtcgtttaggttggagtgtagtggcgcgatttcggtttattgtaagttttgtttttcgggtttacgttattttttttttttagtttattgagtagttgggattataggttttcgttattatattcggttaatttttttgtatttttagtagagacggggttttatcgtgttagtaaggatggtttcgattttttgatttcgtgattcgttcgtttcgggtttttaaagtgttgggattataggcgtgagttattacgttaggttaggtttttgtatttttaataattggaggattttatttggatttgttaattagttttgtggttttttatttaggaattgatttagtttaagagaatagtttttatttattatgattttatatcggagttaattaattagtatttttgatttatcggtttttttatttattaaattatttttaaaaattgattagagttttcggggagattgatttgagtaataaaattttggtttttcgtacggtcggttttgtatgaattattttttttttattgtaatttttttgttttgataaatcggttttgtttaggtagttagtaaggtgaatatattgggtggttataaagggagtttaggttagtgtgtaggatgtgttttgttgtagtggggttcgggtagcggaggaaagttaaggatatttagggaataaatggtagaggaagaaggagtacgagggaggatttaaagtttttagatttttttttttttttttttttgttagggttggagggaattagcgtggttttaggagggatggttggtggggtgtagaaaacgttttggttgtaaaggggcgttacgcgttttatataagggttttggttgttagttgttatttatgagtttaaattaggaggagatttatacgtgttttttgtaaagtagattttttattttttattttggttggttttttaaatttattttgataaagtagaaaaattaagagttaaattttgcgtgggatttttttgatagttggaaggttttttttttttttattttttatatgtgttttttttgttttgttttttttattttgtttttatttttttatttttttttttttttggatttcgtttttgagtatttttcgttttttttagaggatttttttttatgaagtatagatttttttatttttaggaaaaagagataaagattattgagagggatttgagaaatgtttgtgattttatttttgagattagttttttttttagtgttggttttggttgtgtgtgtgtatgtattttgttttgttttgtttgtttgtttttgagatagggttttattaagttagagtagtgtttcgattatagtttattgtaggttttaatttttggatttaggtaatttttttattttagtttttcgagtagttgggattatagagtggagttattatatttagtgtgtgtgtgtgtgtgtgtgtgtgtgtgtattttttttttttttttttttttttttttttttttttgtagagattgggttttgttttgttatttatgttggttttgaatttttggttttaagtaatttttatgttttagttttttaaagtgttgagattacgggtataaattataacgtttggtttttgtgtgtgtatatataaagttaaagtgttaaatttggtatttaggaaatatttttattttggtattgtttgtaatagtcggtattttgtgtatttgtgtttttatttcgggagttgggataattatatttattagaatagtacggtgttaaggtttttatttttagaaagtttaagggatattgttttatgaaggagagtgagattggaggagtttttgattttaagttttttgattttttttatataaagcgatgttgaaaaaaagtgtaggatattttatttttttttgggattagatagggaagttagagttattgtggatgttaaattttagtaaggaaatattagtatagtaaaatttttatgttatattttaaagtttatataatggtttaaagagaattaatattaaaaaatcgaatttttagtttaggtgagattattaaatttgtttgtgaggttttgtggaatttgtaggtagaaaggatatttttatttagagttgtagtttaattgtttttgtattttggggttttttgaaaggattttttttttttaatagtgtatagtgaagttatttttggggagaaacgtagattgtttttggatttttgaggtttttatatttatttgttgattttgtggattttgattttattattaaatattttataacgatgtaatttgttttgattgtaagtgtagaataggatattgattttgaattaggaaataagggattggtgatttgaattgttatttttttttttggtgtttagatgtaatgaaattgtgaggtaataaatttatggttaggtaaagggttaattttattttagtaaatgttttagatgttttttttcgtttagtaatgttttagttttattttagttttaattttttaaaatgtatattttttttggtgttgattttaaagtaattcgtatgtatttattatattgggtttgttgtagtaagttatttcgaatgttgttgtagaattaaagtaagtaaataaatgtgtggttttttacggagttattaatttttaaaaaaaaaaagtttaaatgtttatttttaatttagttttaaggaaagttttttttagattttatagggtagaaatttttgttgatggtatttttagaaggtaagaaaggaattttttttttattatgtttgatttatttttgggttttaggtattggtcgattgataaaggtaattttgagagtataatttatgtatagatgatcgatagttatataataggaattttattatatttgagagagtgggatagatttttttatttttatagtttgggtatttgagtttttgagagtttgaatgtttgatatggattttttaagaatgttgattttgagattttaaagggtttcgggttttttgtgaagttttttgtgtatgtattatattcgtagaggttttataacggcgggaagagtatttagggttagagtttaggcgagtttatattcggggattatttatatttagggcgtgtagaggaggggtcgaggtgagagtttaatttttgtttaggttgtggtgattggtggttgtacgggggttttagcgtttttggagttattattttttattttttgaagatttcggatttgtatatattaaaattttgtatttttggtggagtagtttttttttttgagatgtaaatattatttttcgaattttaaagttagttattgttatttttaagggataagtttttaattttattgaaattagttttagaattttagttgagtatttggagttataggtaggaagtcggtgggatttgtatttggttgatttggaaggtggttttgaaaggtagtgtgtgattaggtgggttttattttgatgagaggagaacgagatagatgggaaggtttcgaaagtgaattttagtgggttttgtgtttagtattaggatttggaaaatttttttttagttatttttggtttgtgggtttttattttgtttttttgtttgttaagttattgtaggtaatttttttatttggtaaatatttattaaatatttattgtgcgcggggcgttgttttaagaggagttgggattgaggtaagaggaaataaattttttttgtttttaaggtatgtttagttttgtttaggtagagattagtaaggaaattataatataaattgagagagaaaaaaggaagaaattggttaggcgggtagttatggtgggtttttagttgaattattttaaataaaagaacggtttgtaggtatagagaagggaatttgtataggggggtttgtttaagatatgtttatagttgtataaataagaaaggttgtataggagatttgtttagatatgttcgtaatggaaaattttgtttttcgatatatgggtagttagggaaataaagtaatatggagtaatttaagttaagcgtttgtatgggtattaggaggatggggtggagttatcggaaatttgtgttttatgtaaatgagatatttagtttttattagttttttgtaaaagtttttatatttagttgtaaaaatggtaattattttttaagtttttttttcgtgggggagagttttttttttttgtttattaaatttttgttttaattttattttttgtatttacgttttttaatttttttggtggtgagataaagaattttaggtaatattttataaggagagattgagaggttgttacgttgtggtgtattggtaagattaataaattggttagtgggatatgtatatttgtttggtagatatatatgtagatttttagttttgattaatgaaggaatattaaaaattttataaaagaaaaaatattatttgagttttgttttgtggtgtaagtgggagttttataggtatttaggataggagagttttgtttagaatttaggaagtgaatatttttttttgggttaggttaagaatgagattaagttgattgaggagtttggtgttttttggtaagaaagggtgtttgatatttgattatttagaagttatagttatttaatattgagatttgaaatagagagagagagagagagagagagagagagagatttgatttgaaaagtagaattttgttgggggtttgttaaatgtagagtttttgatatagtaggtttaggttaggttttgaagattgtatatttaagtttttaggtgatgttaatgttgttttttttaggattatattttgagaattattattttaaggtaatttgtgttggtttttaatattagaagagggttgggagtgggttgggaggtagaggtgtaggattagtgagattatatttgatttattttggatagttttttattttaattttgtagtattttattttttgggagttttgggaatggaagatatttaggaagggattaaatgtggggttatagggtgatttagaggttcggttttatatagtatttggggttttcgttattttataattggtttttatatttttagtttttttattttttacgatattgatttttagatttttttcgattaattttagtaggttgggtttgggatgtgatattaggagttttgagtgtattttttgatttaaagatagggtgatcgcgtatgataagtatttagatgggttattaataggattttgaatatttggtaaatggttttagttacgtgtgtttgagaattttagtgttttttagatatggtatttatgagtttatataaatattagagggcgtcgtgagtatattgaaatttataattgttgtattggattttttagaattttttttttatttagattaagatttgaataaaattttttttattaaataaattgtatttaattaattatgttgttattttattttgtaatggaaaaaagatagatgtaaagaaagattatgtaattaaaaagaaaataacgtattgaattaaaatggcggtaaatttttttgttaaaggaataatataatatttagaaaatttttaaaatttattttaataaaggtaaaaaaattttattagtttttaaaaggttttttattttgaatttttttggggtttatttggttgttttaggaattattttttattttttgatatagtttaaaatttaaaatttaaaatgtttaaaaggtaaaatgttttttttttattttgttttatttttaataggtaattagggatatttttttgtttatttttttaaatatattttatgtatatgtaagtaaatataaatgtgtatatatatttttttgtttttttttatataaattttagtagattttatatgttattttatattttgttttatttttttttaataatgtattatggagattattttatgagggaatattaagagttttttatgtttttttttttttgtgttaaatgtttgtagattttgtcgtgtagatatgtagtgtttgtttgggtttttttaggaaggtagggaggtttttttatgttatttagagtggagtagagtgtatttataggtgaatgttattgtgtttagtttgtaatgtttttttaattagttcgttagtgatagatatttggattatttttttttttattttttattttttttttttttttttttttgattttataaatagggttgtaatatataattttgaatatagttattttttaggaatgtaggtgtatttttggatatatttttagaagtgggattattgggtgtatgtatttttaatttagatagaaattgtcgtattgttttttttgaaaatatttttagtttgtaggtttatttgtaatatattagagtatttgttttggtattattagttttttgattatagaaatatgtagagatatatatttgggagttatttgtgtttagacgatatttaaaattttgggagtggaggatattagagtgattgggaggtagtaaaattttatagtgttttagtatttatagtaaaaggagttaatgaagggggattgaggcggagtagttagttggggaggaagataatttgatttgtaaaatattaaagaagattttaaaggggggagttgatataatttttttagagaataatttgatattttataatattatatggtaaaagtatagtaattttatttttatattcgtattttggggaatttatataggggattagagagagatgatttaggatgtttattgtggtagtgtttgtaatagaaataagttaaaggtcgttgataggagaagagataaattgtgggatattttttttataaatattatttagtattgaaaataaatgaattgtttttatgggtgtgtgggtttattttatagattatattaaacgataaagtaagttatagaatgatatatttaataaaaaataatttttataaagtttaaaattatgttaaacgaaaggatttaaaaaattttgtagttcgggcgcggtggtttacgttagtatattgggaggttgaggcgggcggattacgaggttaggagatcgagattattttggttaatatagtgaaatttcgtttttattaaaaatataaaaaaattagtcggtcgtggtggtgggtttttgtagttttagttatttgggaggttgaggtaggagaatggcgtgaattcgggaggcggagtttgtagcgagtcgagatcgcgttattgtattttagtttggacgatagagcgagatttcgttttaaaataaataattaaaaaaaaaaaaatattttgtaataatataaaggtatttattaaatttaagatattcgtttttttttattggtagtttagtatttagtatagtagtattgtatagtatatagagtattgtattgtatgtgttttagtggaaatatatatataatagaattgtggagaattagggttatttgtatatatttttattattttttatgtatattatatatagttaataatattaaaatgttataaattgataaatttgggtaggggttttataaagattttttttaattttttatttttttagttagaattattttataataattagtagtaatatggatggaattggaggttagtatgttaagtgaaatagattaggtaaagaaagataaatattatatgtttttatttatatgtgaggattgaaaaaaagttgattttatggaggtggagagtagaataatagttattagaagttgggaagggtgtgtgggggatttgggagataaaacgaggtagtttaatgggtataaagatatagttaaataggaggaataaattttaatattcgatagtatagtaggttggttgtagttaataataatgtattgtgtattttataatagttataagagtggatttgaaatttatttaatataaataattgataaatgtttgaggtgatgagtattttaaatattttgatttaattattttatattttatatatgtatgaaaatattatgtgtattttaaagtatgtataaatattatgtgttaataatttttattaaaatattaataagtttagtataataaggagtattttaaaatgatataaaaattatttgtgtgataatttggtaaatattttttgtttattaatattaatttttttttttataagtataaggagaataatatttaaatagtattagaagtggttgtttttttgaaagagaattttttttttagttaaaaatatagaattagaattattaaagtaaataggattttggagaattatatagtattgggttttgttgttttggggcggttaggtttagggagtgtttattttttagggaaaattaaatttcggtttttttgttttggtagtgttttttttttttttttttttttttttttgagatggagttttggtttgttgtttaggttggagtgtagtggcgagattttggtttattgtaagttttgttttttgggtttatattattttttcgttttagttttcggagtagttgggattataggtatttattattacgtttggttaatttttttttttgtatttttagtagagaaggggttttatcgtgttagttagggtagtttcgattttttgatttcgtgattcgttcgtttcggttttttaaagtgttgggattataggcgtgagttattgcgtttggtttttggtggtgtttttattgtaagattaatattttaaaatattaatagagtttagttaaagggttgtatttttttttattttttataatatgtatcgttaaggatggcgtagatttttatgggttaaattgtgtttttgtatatatattttgaggttaatgttgataagatagagggagaagatggttatttgtaagttagagataggttttaggagtagttagttttgtaatatattttatcgtggatttgtagtttttagaattgggagataatatatttttattgtttaatttatttagtttgtgttattttattatggaagttttagtaaattaaaatagagatattattttttttattttgttttatatatgaaaatgagattttttaagagtatgaattatgtaggattttaaagtatagaacggatagattgaaaattgataatggtaggtgatgtagagtttgggtagatgtaggttggtttttaagttttcgtggttttatggttattatataaaggtggagatgtttttatttttttttatttttatttggagtaaaatatgtgggtttatattggtatatgattagaagatatatttaattgatttgagatattgaggtagaaagttttgttgtgtttttatagaaagatgaatgataattattattattaaaggggtttttaggtagggtgttgttggtattatgttttttttttatttttaaggtgtatgtttttaaaaaagttttgtttaggagtaaaggttattatttaaatttttttgtttttgcggtcgggcgcggaggtttacgtttgtaattttagtattttgggaggttaaggcgggcggattacgaggttaggagatcgagattattttggttaatatggtgaaatttcgtttttattaaaaatataaaaaattagtcgagtgtggtggtgagcgtttgtagttttagttattcggtaggttgaggtaggagaatggtatgaatttaggaggtggagtttttagtgagtcgaaatcgttttattgtattttagtttgggtgatagagtaagattttgttttaaaaaaaaaaaaaaaaaaattttttttatttgttaatttattggtttttattttattttagtaaggttatcggaatgtttgtgtttatttaggatttatagatgagtttaaaagtttttagtggtagagagtttttttcgaggttatacggtaatcgagtgtggtggagtaatgataggtatgtggtaattttggttcgtattttagttttttaggtgttatgagaattgtagtttttggtttattttttattattattattttttttttgaatgagtgaaggaaaatgtgtgttgagaataaagtgttagagatttaagtttattttttaaatttgtagggttggggtttggagagatagaggttgttattgattttttgaattttagttttcgttgttagttacgtagttgaaagtaggaagaagtttttttttttgtatttggaataatagggtgaagatgatagagagttttatatttattatggaaaaggtaatggtttttaaattatgttaagttttttaatgatatgtgttttttcgtaatatgtaattatatgttttttttttaagtattagttattatagtataaatatagtaatagtataaaggaatgattattgagtttgaagttttgatggatgttttgagttgagattttgttttatatttaggtatttgtgagttattgtagagttttgtttgattttattatgatttaatttgattaaggtttatatgttatgagatttttttagttttttattagaaattataatgaatattatgtttagtttttgaggtgtttgatggtaacgagcggtagttttttttggggtaatattttgggggtgattaaggttttatagattttattattgttgggttatatggtttaaggtttttgggcgtaatggatcggtggttttggattcgttttagatatttaatgatatttgtttttgggtttttataagtggtttttggttgagatggaaggaaaggacgtagggatataaaatttttgattgtttagggattattttatcgtttttatttttatttaagacgatatggtcgttttattaaattttcgaggatatggttaatatgagtaataatatagggaagtgttttatatagagttttatggaagttcggttagtattttttagattatttatttatatttgttgggatttttttagtatgaaatgttttagaggtagttatgttataagtttggattttttagttattgagtgtgagggttttagttcggtttaaatgagtattgaattttagagagattaagggatcgtttaagttttgaattttgagttttgaattttggaagttggtttttggttagggagtaggtgttattgtttttgatttataaaagtagttttatagtttaagttgtttttttggatttttttttttttttggtttttggttaggtaaatttttattgttttgttagtttatttatttgtttaattagattttttaaatatgtatgttttttttttttttttattgtatttagtggaaggaatggtttaaattatttaattagtaatttttggaaattaagttattatgtatatataattttatatattaatgttatatataagaaagaaaatgtagaggtattagtagtggttatttaagtagtgtaatgtagaggtaataaaaacgaattgttggatagtatttatttatgttatgagtaaaatatatattaataaattataatttttaagaaaataatttttatatgtaatatatgattatgattttgatagataaatttcggagtattgtttgaagatattttttattatttttattttatgagttagatggtgtgaaatgaggagtagagatttgaaatgtgtggtaagtttttttgtaaagtagtagagtaatattttatatgagcgaattaaagtaattttataaatgatattggatgtgcggtgtgggatgtgtgtttttattataatggagttaattttttaagtaggtaatttttttatatgaattggattttaaatgatttattagttattaattagttaggaatttttttttttattaaaagagagattttgttatgaattagtattttttaggtggaggtttttggtagatattaatttttaatagggtaaatgttttgtttttttagttagggaaaattgatttttataagtggtttttggttgagggattttattttgagtggggtatttgttaagttatttttttttgtttttgttggggttggggatgatgaatcgagtgaagatataaattttgagagggaattaggtagataggtagattgataaggagggtattgtttggtttagttattattcgtatttagttagaagaggtgaagggtgagagaggaggttgttgggaattggaatattagtagttaggaaggttaataaagtgtaggttgatagtataggttagaggttggagattttgggagggagttttgttgttttttttgagttttagggtgtaggagagggttttttttattagggagttttagtttttaggatgatttttgggttttgtattttattgattttttatgaggattttaaatagtaagatgaggtatatagggttttaggaatttgatttttatatattttgaaatatttttattaaaaatattatttttatgttttgtttattttttataatatataaaatattaagttaaattatcgtatagaatttattaatatgtagatatgaggtgtttggtgatagattttttaagttatttatattagaggaagaaagtggtttggttgtatttatagatgagaatagtagggtagtaatatttaggattatgatattgggtgtttttaatttcgaagggaagcgttttattgtatatagatggttaggagagtgattatagggttttgtgttattttttttttttttttttttgggttttgggttttattttttaattttagttggtagtaaaattaatttggtatttaagatttttatggtttttttttattatagtattttattaggtttttttttttataagaattttagtataggggtgtattttagaaatattattatggaaggggtggtagaggtagtttatttttaattttttaaatagagaggatggagttatagttttgtgttttatttattttatggttttgttttaaatatagttttttgtaggttgttgggttttttttattgttattttttagatggtgatagggttttaggtagacgtgtttatagtttttttggggtttgatgttaataggagttgaggttagggagtagttttgggttgtacggatttttggatttgaaggtaggggatggtgatgggttgtttataatgttttaggtgtaaaggttgagagcggttgagcgggatttggttattattatgttttttatagtttgagagttgttttgtgtagattagtaagaagtaagatatagatagtttttagtttttttatatttttgtggatttcgatttttttttttttagttgttgtttttttaagtatagtttcgggaggatgtagggagagggatttatttttttgatgttttagaattttttttatgtaattttaatatttaggtttggggtttttttttttggatcgatttttttttttttggaatgaaagggttatagggttttttttttagatttttattgtgatttatttattttaaatagatgttttgttttatagttattttttgtatagtgttttttgaagatgtgataaaatattataagttattaataaaatatggaagttaggttttttttttggattttgaggatttgttgtgttggggtaggggtaggtggggagagaagggtaggtggaggggtaggagttgagtggtgtgcggtttcgttttgtgtttagtaaagtttttgttgtggttattttttgtgtatttgtttggatttttttatgtgttgggatttgtgtttggtttttaggggcgggtgttgttttaggtcggaggttttatatatttttaggttgagtttttttttaagtttatggaggtcgcgggttgagaatggttagttttatttttgttttgagttttattttatttggtatatttttatatgttgatttgattttttttataagggatgtttatgagtattattttataggagagttattattatttcgtcgtggttatgttttgtttttgatattaggattttgggtgttttgtttttgtttttttttaaagtttcgggatagtttttgtacgtggggttttttagatgatatagattgatgatttttattttagttttttttttttttttatttttagaatatttttattttttttttttattatattgttagatttttaagttaagggttgggtataatggtttatatttgtaatgttagtattttggaaggttaagttagggggattgtttgaggttaggagttgaagattagtttgggtaatatagtaagacgttgtttttatgaaataaatcgaattaatattatgaatatatgtgttattgttatgttataaataaatttttgttattttttttgtgggatagttagggttttggtaggaaagagatgataaagaaagaagatatatattatagaggtgttggtaggtttaagaaagttataaggggtgttgaagttttttgggatgattagtggtaggaaattgtttttatttttgagttgaaagaataaggaagagggagtagtttttagaatttacggaaatttgtagtttttattaggggtagtttcgtaggtttgtggttgtaggtagaggacggtaatgattatagaatcgtagagttgtttaaagggagtgagggaagtgaaaattttgagttatttttttttttacgtttttattttttgtaggtgtttgttattatttatatttaagtagaagtaggtggtgtaggagtataggtcgtgttgtttttgtggtgtttttagtgtagggggtaggatggaggagagtgaattatagttttgtggaggggaagtagagaataatgtatttatttgtttacggtgtttatattttttagggaatttatttaaatatattagagtttgttttaatttaaaaatatgattttaaaaagaagtattttatttataaatgtatagtaggtagtaaaattgagtattattttattttttttttttttttttatatgggattgtataatttataaatgaataatttgatttattattatttttttaaaataatttgaattatttgggtgtaagttataaaagtagagtttggtttagattagtaaagggaagttgttgggtagttgggggtgtagtttatagaattatagatatttttaaagtattaggatagtatcgaggagtaggcggtaagttttgattagtttcgttggattagattatggagtgaaagaatcgttattgatattgatagtttgtgattgttgatgttttaaattttgagatagtttatttaaatggtttagtttagattttatgtattttttatttttttgtgatttaattttagggatagagttaatatttttttttaagggaagttttttttttgtttattttgttaaattaggtggaaggggaagatttttttaagtttttatggatttatatatattatgatattaatttaattgtttttatttagtgatacggtttggttgtgtttttattcgaattttaatttgaatggtattttttagaatttttatatgttgtgggagggatttagggggaggtaattgaattattggggttagtttttttcgtggtatttttgtgatagttttacgagatttaatgggtttattaggggttttcgtttttgttttttttttatttttttttgttattgttatgtaagaagtgttttttatttgtcgttatgattttgaggtttttttagttatgtggaattgtaagtttaattaaatttttttttttttttagtatgtttttattagtagcgtgaaaatgggttaatgagaggggttattttttttattattagtggcgttgtgggaggtttttttgtatttatattgtagtttaaatttattaaaaggggaattagagagttgggttaggtattttttttttttatattataggaattttagttgtgttttttttttgtttgatagatttaaatttagatagttattaagttgttgtgtggttacgttttggagagaaaggaaagtaggtaggagtgaggatattggtattttaattgttgtttgtgggtatttgtatatttatgttttatttttatatttatatttatatacgtgtatatatattttaatttttatttgtgtatatatgtatatacgtgtgtagttatatatatatatttaagttagtattggaggatgatattttttaatatttttgtatttacgtgttatttttggggatttgtgcggttggaggtaggaggttttgaggaggtattattagggattattattagggggagggttgagtgagtggggttttgttaaggtattggtggatgggatgatatttacgggatgtattggtaggggtagacgtttgttttaaggttattttttttttattttttttttttgtttaggtttatagttttgatttgaggtttagttagaaaggtagaaggtatttttttatatagagtatatagttttttttttgtattagaattttcggtggtattattaagttggatagatatagttaggcgaggtggggggttattgtagaggataagaaggttttgttttggaatttgtagttaaatatttttggttatagattgaaggttgtattgttagtttttttatttttgaggttttgggatttggattgatttattattggtttttttgtattttaatttgtagacggtttgtcgtgggattttattttgtgatcgtgtgagttaattttttttaataaatttttttatatatgtatatatattttattagttttgtttttttagagaacgttgatttatatagtgggtgaggtagggagttgcgtgagttgtttaaaagttattaggagttattttttttaggttttggttttattttagtgttaggttttgttatagtttttgtttttattttattttgttatttttagtttttttttagtttgattttagatagaatttagaataatttttgtttttgatttgaaaaatgtttttgttagtttaggtagaatttgttttagagttttggtgtttagttcgttataggttttgtgtttgttttttttggtattgtgtttttttttatttatttttttgaaattttgtaaggtaggaattatgttattggtttgtagatgaggaaattggtttagatggttttatttagtatttatttattgggtaagtgtttgtcggggttagttttgggttagatgtgtttaggtttttttagttggttggtgggaggatttggagggtttatgtttaggtttaggtttatttgatttgaaagttttttttgattttgttttagtgttgattttttttttgtaggtgtattttttattgtgtttttttttattattgtttgttgatattgtatttttttttttgttttttttttttttttatttttttttttttttttttgtttttttatttatagatcgaatgtttgtggtaattttgtgttaagtaggtttatttggtattatttttttaatagtatgtgtttattttatgtttttgtgttatattttggtaatttttgaagtattttaattttgtttattattatatttgtatggtgatttgtggttagtgatttttgaagttattttcgtaattgttttgggatattatgatttatatttttataaaatggtgaattttattgataaatgttgtgtatgttgtgatttttttattaattggttggttttttgattttttttttttttttcggttttttttattttgtgagatataaaaatattgaaggtaggtcgattagtaattttataatggtttttaagtgtttaagtgaggagaataattttgttgtaaatttcgttgtgttattttaagaaattgttatagcgattttagtaattatttttttgattagttagtaattattaatattgaggtaagattttttatagtaagaaggttaggattagttgaagttttaggtgattgttagtattttttagtaataaagtagttttatattaaggtatgtatatagtttattttgtatataatgttattgtatatttaagagattatagttaagtgtaaatataatttttatatgtattgggaaattgaaaaatttgtgtgatttgttttgttgttatggtttggagttaaatttgtatatatttgaagtatgattgtaatttttttttttttttttttgttggtttagaatgattttgttttttgtttttgtttagttttgtatgttgtaggggtttgttttttttggtaggtttgggtattttgtattttttgtaattttggtttttggaatatgatattggtatagggtttaagttttgttggattagtgagtttttttttattttttttgaattagaattaaagtttcgtgtatatattgtgtatgtgtgagtttgtgtagagatgtcggttttttgtagcgtgttttgaaggggtgttttgttgtgattgggggtatagttataggttattgggtagaggtggtttagaagggagtggatggttttagttttgattatttgaaaatagggaggtttttagagaaaaattaatgttttagaaggtaaaattgttcgagagtggataatggttaattaggttattatttgggatattattttgtattaggagggaagatggtttttgttatggtatagaggtttaggaattaggtagggaggttttttcggtggttagtgttttttataattggtagttaaagtatttttagatgaggttaaaggttttatgttttttattagttgatttgtttttatttagtggaaaaagaatatagaaattttgtaaaatgttaggggagaggtatttttttttttgatttttagtgttagggttatgtatgacgtatatttgtattgtaatgtgtatatagtttaaagttttaattattagaatataagaggtttaaattattgtttttatatatatgtgaaattgtatatataaggttaaataatttgtaattagttaattttgaagatatatttattatatttgtagatttttaaataatattggtaggtatttagaaaaataataaatgagatttttgtaagataatttaaattatacgttgataatattgttttatgaagaggatatttgaattatttgagtttttgttttaggttataattttaaaatggacgaatttttaatagtttatagtaggtagttttaagttataaataaatgtgttagtgtagatttgagatttggagtgagttttttttttttagggatatgagtgaattttttaagatttttttttttttaggttttttatttagttattagggagataagaaagggtttatatagtattgaggtttaattattttattgtttttatttttatggatagagtttaggtgaaagttatttttgagttttttttttcgttttttatagttttagtattattatttgttttgagtttattaggattgagtttattatgttttttttttgtttgtgttagttatattgggttttttaaatattttgtatttatatttttataaggttttgtatatttttattttgtttttttatattttatttttaaatttagaagttttttcgttgtgttttttggaatttttagtttatgattagtaaaatttttatattttgttttaggatgtttttggattttatagttttagcgatgtttgtgtttgttagaggatgtggttttttttaaagtttttttatatgggggagtttgtatagggattttgtatttttggtttagaggtggggtggtatttttattttttattgtggtttttagatttttttgttttttttttttttaagtttttaaagttgttattagatttaggttttattttttttattgtagttattttttgtgggttttaggtcgttttttttagttttgatttttgtagtttttggtttattatcgttttttttagtagtgttgtttttttgattttcggtgattttaatatatttagatgtgatgggtcgagtaatggtttttaaagatatttaattttaattttgggtatttacgagtaggttgtattatatggtaaaagggaaaatattgatgtgatgaagattaaggattttaaaattgtaagattattttggattatttgtgtgggttcgattaaattttataagttattaaaagtagagaagttgttttggttggagttagatgttgtagaggaggaaggtagaggagatatcgtagaagggggaggttagaggttttaagtaggaggattggatatgttgtatgggatatgtgtgaggaattgagagagggttttaggagttaagggtggtttttggataggagttagtaaggaagtggggattttagttttatttgtaaggaagtgaatttagataagaatttgaatgagtttgatagtagatttttttttagagttagaaggaatatagatttttttttattttgattttagttttatgagattgttgaaattgtaatatatatgattgtgatatgataaagagatgttgtttaaagttatttgttttgtgttaatttttatggtagtaataaatatttatagagtagagaggatgtatcgttttttggttttttagatgttgggattttttttttttatgatttttttttttttttgtttgaattttatgtttttgttatataagtattatttcgtaggagagttgttattatttcgttatggttatggtttgtttttgatattaggattttgttgttttgttgttgtttttttttaaagagttttaggttttattatggttaagaattttagtttttttatattttttattttatattttttattttttgattatttttttatttatttttttgtacggaggttataggttttgaggatatttatattattattttattatatgttgtgacgtaatattagtgaattatttattgtttatgtgtttgttttttaggtttggagttttttttgtagtatattaattttaataatttttttatttattttgggatttttaatttagtgattttgttatttatttattgttttttatttttgatgtttttttttttttttttagttattttgaattttattgtaaataatttttattttttttttgttttttttttgcgttgttatatttgtttggtaaaattatatagttggtggaatttatttttgtttatattgtatttgtttttatgagttgaaggaggttggaaagtagtatatagtatgttgatttttttttttaattttatgatttaaattttatggggattttttattacgattagtaattattttttttaagtatggtttatttttagttttttattggtttgggtgatttttatatattttttttttgtttatatatttaattttttatttgtatttttattttagttgatgattttgttttttattttattgagaaaattgaatatattagaagataattttatagattttatttgtttatgtatttgtagttgtattgtatgttgggttttttattatatggatggttgttgtgggttaattttttcgtttttagttagagttagtttttttattggtgttttaaatattattttttttatttatttaaaggtattagtttattagtttatatttttttttttttttgattattattttttgttttttttttttattggattgttgtggtagttttgagaatgtatattttagttttttagttagaggaagtataattgatgatgttttagttgttgtcgtttgaaatttattgttacgtttgtttttagattatatttgttattggttttttcgatttaataattgagagaagaggagaaataaagataggattgttttttttttaaaggtttattgaggttttagggtttatttttattgaattttttttaatttgtattgggtttaggatatttttagttaaattttttttttttttttttttattggggtttaaatttgtattgtagtttggttgggtatagtggtttacgtttgtaattttagtattttgggaggttaaggtgggtagattatatgaggttaggagtttgagatcggtttagttaatatggtgaaaattcgtttttattataaagataaaaatttgttaggtttggtggtgtatgtatgtaattttagttatttgggaggttgaggtatgagaattatttgtatttgggaggtggaggttgtagtgagttgagattgtttaaaaaataaaaataaaaaagttatttgcgttatagttttatggtttttttagttttttttgttttgttttttaattttttttatggttattttttttaataaattttggtatatttaattttgtattgtagtttgttttttaggggatgttaattaatataagtggttttaggagtggtttatagatatagataaaaacggggattggggttgagtttgtttattgtttggtaggtcgagaatgttatttacgttggttggggatagagaaagtttatggtataaggtgtagttgagttgttgtggatatttttagtacggatttgagaagatgttttggttttcgggtgttatggtaggtggtgtgatagaagtttttatataataatgatagggtgggagggaaaatttataatagggaagttggttggttattgtttagttgtgttgatgttttataaaaggagaatgagaatttgagggattttaatagttgttattggttacgtgtgaggtttttgtagtgttttatggagaggtttttattttttgtagcgaaagggtagatagtgtggaatggtagttgaagatattattgtgagggttatagatttttagagatgtttgatatttagttaaggtaggtttgttgtggaaaattagggttttggtggggaaatatgagattttgtaaattaggatagtattattagatgggtgttttttagtattttttgggtatgtagagaaggttcgttttttttagtaatggtttttattttttacgttggaagatgttgtagaagttttatttttataatgtagtaggaattttatttaggagttttgtaggaattagttggtatgtttatataggattttggggaatatttttgggattggaatttgagggtatttgattaaagggatagaattttaagttagatagataaaaattttttgatttgggaatatttttttaagttatgatgtattagtttattttatgttgttgataaagatatattttagaatgggtaatttattaaaagaggtttaatggatttatagttttatgtggttagggaggttttagaattacggtagaaggtgaaagttatgttttacgtggtagtagataagagaagaatgagaattaagcgaaagggatttttttttttaaaattattagattttatgagatttatttattattatgagaatagtatgggaaagatttgtttttatgatttaattgttttttttttggttttttttataatacgtggaaatttaagacgagatttggttggggatatagttaatcgtattatatgggttttttaaagattttagggtatggggtaaatttattgttggggtgatttatgtagattgggaaaaaatgatgtcggtattttataagttagatttgatttagttgtttcggaatatgtagaagagggaataatgaggttgggggaatttggtttgtgggatggagatattacgtgaggtcggaaagtttatcggaatcgtgttttataagaggatttagggggtttattttttattagagttttaggaacgtgttggtaatagggatttgtattattaagaagttttattgtattgttttttgaaggttgagggtgatggtaggaaaagatgttttagagttgggtttattaatatttacggagagggtgtggttttgaagagatagagaataagtggtggtagtgatttgtaaaagttagaggatacggttattatggtaattttagaggagtagtcgagggggtttgatttgtttgtagttgtgggtaaggttaatagagggtggtgttttagggttagaatagaagggtagttagtaagagtattgtttggtatttatgataagaaagtaagaattgaggagtaggaggttgagggtgtttgaattaatataaaattatgatttatttttagtgtttagattttagttaagttttagatttagaatttagtgatagaggaggtgtttatatttttaggaggaaggattttgtaattttgtggtaagtgtatgttgggttaattttttgagttattgtgtaaagggatttatagttatttattttagagattgtattttgggaaagggaaatagggagaatttgggggagtattgattttgggtgtgagatgatattgatgtttagaggtttatagtattattatgatttttttatattggggattacggagattacgaaataaatttggatatattacggtttattatggggttattgagtttatagatttagttttggttatttttttatttttttagtgtataattgatattgatgttttggtagttggagttatttttatattgtatttttagtttgtggagtaagggtttttattgtgttgaaggttaaagggaaatttttgaaattgtttttattttggttaaattaaaaatgattatatgttttagggtgaattttgtggaaggtattgtaagtgttgtgggggtagtattattattagagagttggaggatgtggggtggtgttggggttgtttattatttttatgtaatttagtaaataagtttgatggagtttaaggaatgaatgggattattaaggaatgaatgggattattttagatgtgattaagtaggagttttgattgtagttagtatgttggttggatatatttggtagagtagattaataaggttttaggtatatagtgtgtagttgtggatgtggtgagtgtatttttttttattttaattagaagtggatatagttcgggtgtggtggtttatgtttgtaattttagtattttgggaggtagaggagggcggattatttgaggttgggagttcgagattagtttgattaatatggagaaaatttttttttattaaaaatattaaattagtcgggcgtggtggtatatgtttttaattttagttatttgggagattgaggaaggagaataatttgaatttgggaggcggatattgcggtgagttgagattatgttatcgtattttagtttgggtaaaaagagtgaaattttgtttaaaaataaaataaaaataaaattaaaattaaaaataaaatattagttaggtatggtggtgtgtatttgtaatttagtttgggtgatagagtaagattttgttttatatatatatatataaaagtggatataaagtgatttatgtgggatttataatattttaatttatagtttgttttagggttattataattttttaggtttttatagtatagttttaagagatttggagaatttggatatattatagaatattaaatttttttattttattgataatattatgttgattgggatggatgagtaagaggaggaaggtatattagaggttttggtaaaatattttttttttagagggtgaagataaataaattttatagagatttagaagtggttattgtagtgaagttttataggtttagtggttaggggtatttaggggtgttttttttaatgtgaaagataaattgttgtattttgtatttttatgtaaggaaggaagtatattgtttggtgagtttgtttgagttttgatattatattttatatgtaggtgtattgttttgatttatattttaggtgatataggaggatgttagttttgagtggagtttttataggaaaggatattgtagtagatttaggttatggcgtagttattattttttagattttttggtgttgaaagtgttagtggtggggtaagatttggggtggagttgaattaagtattagtaggagagttatagtggagggtttgggattttggagtaaggttatgttatttatagtatagaaatatgttttatttaaagtagagaaatatgttggaagtaatttttggtatgttattgtaggttttgataagatagaatgtttgattatgggatataaaataattatgtgattttaagtgtttttacgaattagtatttgtgtaatttatgaagttatatattggatatgtttaatagtatttattatgagatggaaaagttttttgtgagttgagtttgaattttatgttaatatttttagaaaatatttaaatttgaaatggttttgaataattaagtagaagtattgaaattagttagttttttttatgggttagtttaggtcgggtaggatgggtatataaatggagtaaatatagtggtagggatgaggttatttatgggtttaatagtattgatttttttttattaaggtagatttagatattgttatttttaaatgttttatttattagtatttgaatttaatgattttttttggtagggttttatttttttaggtgattaattagattttaagtgaggagttgattatattgtattttttttattttggaagggttagaggtttatttttatagggataggtatttattttataggtgggtttttttgttttgtttttagatttttagttagtattattttttgggggttgttgatatttttgatttataggtttggtattgtttttcgtgtagtattttcgtgggggatttatttgatagcgaaggaggtgtagtgtggttatgttgtgggatttattggttttattattatttgtattaattaagggttgttggttataaagaatgttgaaaagagtttttataggtatagtttaacgttagtttgtaggaagtattttgcgggtgggagggtgttattttttaggatatggtgtattttaaaaattaaagatatttttatagttttgtaattttagtaggaagaatacgtgggtttagatattaaggggtggaagtggatgtggttttatattttatttttttaatttatttgtcgtgggattttgtattttttttttaaaattatattttgtagggtagaaggttttggattttaaaggagggtatttttaaaaggagataaatgagtgtttattgaattatatattatagttgttataggggaattggatagtatgtgtttagagattagcgggtgagaagaggagtttttttttttttaggtataggtaatagattttgatttttaggaggaggtatggttgttgttatataatgagggtaggaggagttcgtgtggaatttagggatttttttgggggttttttggttttttttgttttattgtaagtgtgaggagaatcgtttagttatttaatttgagagggtttgatttttaagagtttagattttttaggaaggaagattttagtcgtatttttaggtaattttttaaggtttcgtttttgtgttttgatatttttagtagtattggtgtagaggttttattttttttaggttgtttttagcgggtgatgggttatattagggatattaaagtaggattatttttgggatatagaggatttttttgatggttaatagtggttggaggatttttttacggttttgattaattttttttagattatttgtgttttagaatgtatttaaaatattttttttttttttgtttattatttgggggtatatttgtattttagtttattgttttttttagagttgtaatgtaaaaatgagattatttttgttttgattgtaattgtaatttgtaattaaatatatgtgtagatttattttttcgggcgggtttttcgttttttttcgtagaggttttttttttttcgatttcgtatttatttgtttaggtttggattagggttacggttttcgagaatagtaggaggagggttcgggattttatgattcgtaattttggcgtttggggagaatttgagtttcggtgggtcggcgaggattttagaattaggaatcgcggcgatattgattggttgatttaggaatttaatatttaatggaagtgagaattgaggtcgtattatgagtatttaggtaaaaggatttgatataggttgggaaaggtggaagagagagagcggagttcgggaaattttaaagttgagtcggtttattttaggtatcgttttcggggtttgaagtttagagagttaagtttcgggttttgggatttggtttttattttttttttttatattaaacgttttgttttaatgttttttcgaattttggtttcggagttgtttgagaaattagagaaaaatttttagtatgggtttagtttttttttttttattttttattttagaatttttttttttgaattggattttttgttttttattttttgtttgtttttttggatttttttagaagagagtttatttaggtagtttgatgttatagagtgagttttttttgggaatggagggaaagacgggggttgttttttttttaaatttgaaaaagttgtgtatttggggatttatgtggttttttgtttttgtaggtatttgtttagaaataaaagaaaggtagtttttttatgatttagattaatttggagtaaatttttggaatattgattagtagttttttttgatttttgtagtagttttgggtattgtgatttttttttttaggttttgttttttgatttatatttagtgtgtgtgggggtttgattttagtttttttgagtttttcggtttttatttaggttaggattagaagtgattgttttttttttagatattggaattttttaaggaataggagattattttaggtgtttgtgtttaggttggtgtttgggttttgtgtttttttttttattttaggtgttttgtttatttttaggatggttacgtgagtgttgttggagtgttttatgaggagtgtaaagtgtttgaattttttgattttatatttttatttgttttagagaaagaatttatagtttattttaggttttttttagaaataagggtgtttgttttatagaaagatataagcgtagaagtttttgtttttatggagatgaggtgtgtcgtttttttagtacgtggatatgcggatgtgtttattaattgggaagttttttaaaatttattgtttagaggtgtttatggaagttttattgtgtaggtaagattggtgaaattattggttattgatgattgagtttaatttttagttttttttttttttttagaggatggggatggtagtgaaagttttaattttttaattatagttggtgtttttggtaagtagtttttattttgaaattatttaggagttttttattttatagttattttattgttatattaaaattatgtttattattgagggattgtaagcgttttaggatttgtttgttagggattaggggtaaagattaaatatatttattggattatagattattttttggtttttaattatattatttttttttataatttttatttatttatttattattttattttagagataatgttttgttttgttgtttagggtagaatgtagtggtataattatagtttattgtaattttaaatttttggatttaagtgattttttcgttttaagttttttgagtagttggtattataggtgtatattattatggttgattaatttttaaatattttgtagaaatgtagttttattatgtgttttaggttgttttgtaattgttggttttaaaagtaatttttttattatggttttttaaagtggtgaaattataaatgtgagtttttttgtttggttaattatagattttttatagtagaagaattatagtagtaaaaagatattggtttattattagagttttgtttagttattattaattcgtttattgtagtttaaaaatagtaatggttttagtaatatatggttttaattttttagatatttggtaaaaatgagataaaagataatattattattcgtttatattttttttgaggagattatgttatattggattttttttattatatattttatttatttatttattttattttagttattatttttttttttttgtatttatattaaatattttttattttggaagggatattaggtttttttgttgtgttggtttatgtagggagttatattatgttagtaatagcgagtgttttttattagtttattttagtttatagaggttagggttatttaggtagagaattggttggttatttggtttttaggtaatatagttgtatttaatgttagttttaattttgttagatgtagtgaaggtatatttattttaggtttttaggtagttttgtataatggtttttaaatatgttaacggttttttgtttaggaataatttttgtgtttggatttttatttgtatttttagttttgagattattgtattaggtatgagaaaagtaagttgaggtaaagtatagttataattttagtgttttttggttttgggaaggattgtttttatttatttatttatttattattttttagggaagaattgtatgtagaattatattagtatttttttttgatttagtagggaaaaagaggatattttttagtggggatatttttttgtttatatttatgttaagagcgagtatatttatgaaggtgtataggttcgttttttatgtttatgttttttcgtttttgatttatatatttaatgttttaaatgattattttaattttttttgaaattttttttttgaggaataaatttttttgattattgttggatattttgggtaagtgtgttttttagtgtaatgtggtttagtggtttatatggtggtaatattttttatttacgtttttttttttttttttttggtttttgtttttgtttttttttttgttaaagagaatatttttttttttttttttttttgagatatagttttgttttgttgttttgggtgtagtatagtggcgttatttcggtttattgtagtttttgttttttaggtttaagttattgttttgttttagttttttgagtagttggaattataggcgtgtattattatgtttggttaattgatgtagttttagttgagatagggtttcgttatgttggttaggttggttttaaatttttgattttaagtgatttatttattttggtttgttaaagtgttgggattataggtgtgagttattgtgtttagttttgttaaaaagaatagttttattgagtattttgtgtttattagaggtgggggatgtaaggggagtatgttttgatttagtttatttttgtattgttatagttttagtgtttatttatttcgtagatttcggtgatttttataagtaaatgtaaatttttttgagatgtggttttgatatgttttttaggttagatttaaatattttttaggttaaatttaaatgtttgtatttaagatatttttttgttttagatatttttatagttgggattataggtgtatttggtaagtatttagagataaatgtttgttgattttaattattttttaaatttggaagggagttattttgatgggtattgaatagtattgaggggatggtattaaattatttatgagaaattattttatgattgagttattttttattagattttaattttaatattgggaattatatttcgatatgagatttgggtggggataatatttaatttatattaggtattaatatgttttacgttaatgtattttttaaattattatagtgatttttataggattgtgttttatatgggtattttttttataggttagttttttattgtttttttaattaattatatggttaggttattagttattgtttataagttagtaaaattaaaatataggagtttttattattgtttaatttttttattattgttaagaaaatattttgtaatttagtttataagagttgttttgtttttattttttttgattaaaggggtagatttttaaatagggtgttgtttatttattttgtaaatgttgtatataaattaattagttttttatgggttaggtgattgatattgtagtttaaattttaggatagaattttattttgtttggggaaggttagtgttttatttaatttatatttttaatgaattgaatgaagtttgtttatattatagaggttaatttattttatttaaagtatagtaatttatatgttaattatatttaagaaatattttaaaaagattatttagaataatgtttgattacgtattttggtattaggtttaggtgataaataaaattatttatgatattttttaatataataatattttaaggaaattagtttttgtaaaggaaggaataaataattgtttttgaaaatgtataattaattattaataaattttttttatagattgttttttaagttcgttttatagttgtgagtgagagtaatacgtatttgtttaaaattagagaaggagagaaaattgaaaaagtagaaagtaaaaatgaaaaatataaaatataatatataagaagaataataaagatgatagtagttattttattggaaataatgtaaatgagggatagatgattaatatcgttaaagttttgaaagataattgttgttaaattagattttatttttagaaaaaaaattttttaaaaatatatatatatgtataattttaattgatatataataatatatttatgaggtattgtgtgatgtattgatatatgtatattatgtgtaatgattgtattaagttatttaatagattttaaagatatttataaaaaaagggattttagatttatagggagtgaaaaaatatataattagtagatacgaattgtaataagtgttttagttttttaggtaaaaagaaaattatattaaaagtaaatatgtaatgaagagtattagaaatggtaagtatatgggtagatatataagatttttttataattttaaaattttattaaaagataattgtaatgtttttattaaaaatggtagagaattttaataatatattttttaattaaagtaattattaatttggaaaaaaattattaaaattaagtttttttgtattttggagtttatgaatttttttttttttttttataataattaaagtagtgtttaatgaaaaaggagttttagattttggtaggagagtatgtgttattattttttagttatttatttatttttatttttatatttttagttatgaggtagttatggggacggtgttttatatttttggtgtagttttttgatgttagaaaaggtaaaatgaattttttttttaaagaattgtgtttgtgttttttgatatgtatgatagtttttaaaaagattagtttagaggttggtttttgttttattttttttggaattttattaagattggagaggtttttatagtaatgtttgttaaaagtatttaaaggtaaatattagttatagatgtttggggtatggaatgatggatgggttaatagtagatagattgaaaagtttagggaggtagaggttggagatggagatatataaggtaatatggtttttaaaatatttcgtatatattgaggaaattagaatgttatatatatggttagggttaaatattggatatttagttttggatgtttatattttttaaaaagatttgagatgattttaggtttttatttttgggtgatttttagtttttaagtaagtagttagtgaaggttaaggtggacgtttaaattgtttggttaagtgttgaagaagtgttttaatttagagtttatttgtaaaatttgggagggtattaattatttatttttttggttttagttgtttaaggaaatttttgttaaattattagttgattatgaagttaatagaatagattttagtgattatatatgatatagaatagtttaataatagtttagaaaagttattaagaaataattttatttttaagtggtaataagaaattttggggagtggaaagaatatggtatttagagttattagattgttgtatttaaagtgtttagtttttagcgaaaatttttgaggtatttagaagtttaagaaagtggtttatttgtagaaaaaaatatattagtagaatttgtttttaaggaagttaagttattggatttattagattaagattttaaattaatagtttaaatatgtttaaatagataaaaaagatcgtggattttttttttatatatgtaaatatatatatatatatatgtatatatatatatatatatgtgtatgtgtgtgtatatatatatgtatatatatatatatatatgtgtatgtgtgtgtatatatatatgtatatatatatatatatatgtgtatgtgtgtgtatatatatatgtatatatgtaaaggaattagaagaataatattttattaaataaagatttattaaaaatataaggaaaaaaaaaaatttgaatttttgttttgtttttgtttttgtttttgttttttttttttttttttttttttttttttttttttttttttttttcggtttttttttttttttttttttatggtttttttttgatgtcgagtcgaagttggattgtattgttgttatttcggtttattgtaatttttttgtttgatttttttgttttagtcggtcgagtgtttgcgattgtaggcgcgcgttattacgtttgattggttttcgtatttttttggtggagacggggtttcgttgtgttggttaggttggtttttagtttttaatcgcgagtgatttgttagttttggtttttcgaggtgtcgggattgtagacggagtttggtttatttagtgtttaatggtgtttaggttggagtgtagtggtgtgattttagttcgttataatttttattttttagtcgtttgttttggttttttaaagtgtcgagattgtagtttttgttcggttattatttcgtttgggaagtgaggagcgtttttgtttggtcgtttatcgtttgggacgtgaggagtttttttgtttggttgtttagtttggaaagtgaggagcgtttttgttcggtcgttattttatttaggaagtgaggagcgttttttttcggtagttattttatttgggaagtgaggagcgtttttgttcggtcgtttatcgtttgagatgtggggagcgtttttgtttcgtcgtttcgtttgggatgtgaggagcgtttttgttcggtcgcgatttcgtttgggaggtgaggagcgtttttgtttagttgtttcgtttgagaagtgaggagatttttcgtttagtattcgttttatttgagaagtgaggagtttttttgttcggtagttatttcgtttgggaagtgaggagcgttttcgttcggtagtcgtttcgttcgggagggaggtgggggggttagtttttcgtttagtagtcgttttattcgggagggaggtgggggggttagttttttattcggttagtcgtttcgttcgggaggtgaggggcgtttttgtttagtcgtttttattgggaagtgaggagtttttttgtttggttagtcgtttcgttcgggagggaggtgggggggttagtttttcgttcggttagtcgtttcgttcgggaaggaggtgggggggttagttttacgttcgggagggaggtgggggggttagttttacgttcgggagggaggtgggggggttagtttttcgttcggttagttgtttcgtttgggagggaggtggggttagtttttcgtttagttagtcgtttcgttcgggaggtgaggggcgtttttgtttagttatttttattgggaagtgaggagtttttttgttaggttagttatttcgttcgggagggaggtggggggtttagtttttcgttcggttagtcgattcgtttgggagggaggtggggggattagtatttcgttcggttagtcgtttcgttcgggagggaggtgggggggttagtttttcgttcggttagacgtttcgttcgggaggtgaggggcgtttttgtttagtcgtttttattgggaagtgaggagtttttttgtttggttagttatttcgtttaggagggaggtgggggtggttagttttttgttcggtagtcgttttattcgggagggaggtgggggggttagtttttcgttcggttagtcgtttcgttcgggaggtgaggggcgtttttgtttagtcgtttttattgggaagtgaggagtttttttgtttggttagtcgtttcgttcgggagggaggtgggggggttagttttacgttcgggagggaggtggggggggttagtttttcgttcggttagtcgtttcgtttgggagggaggtggggttagtttttcgtttagttagttgtttcgttcgggaggtgaggggcgtttttgtttagtcgtttttattgggaagtgaggagtttttttgttaggttagttatttcgttcgggagggaggtggggggtttagtttttcgttcggttagtcgattcgttcgggagggaggtggggggattagtatttcgttcggttagtcgtttttttcgggagggaggtgggggggttagttttttgttcggttagacgtttcgttcgggaggtgaggggcgtttttgtttagtcgtttttattgggaagtgaggagtttttttgttgggttagtcgattcgttcgggagggaggtgggggggttagtttttcgttcggttagacgtttcgttcgggagggaggtggtagggttagtttttcgttcggttagtcgttttattcgggagggaggtgggggtttagttttacgttcgggagggaggtgggggggttagtttttcgttcggttagtcgttttgtttaggagggaggtgggggggttagtttttcgttcggttagttgtttcgttcgggaggtgaggggcgtttttgttcggttatttttattaggaagtgaggagtttttttgtttagttattatttcgtttgggaggtgtatttaatagtttattgagaacgggtcgggatgataatggcggttttgtggaatagaaagggggaaaaggtggggaaaagattgagaaatcggatggttgtcgtgtttgtgtagaaagaagtagatatgggagattttttattttgttttgtattaagataaatttttttgttttgggattttgttgatcggtgattttatttttaattttgtgttttttgaaatatgtgttgtgtttatttagggttaaatggattaagggcggtgtaagatgtgttttgttaaatagatgtttgaaaggtagtatgttcgttaagaattattattattttttaattttaagtatttagggatataaatattgcggaaggtcgtagggttttttgtttaggaaaattagatatttttgtttatttgtttatttgttaattttttttttattattgttttatgattttgttaaatttttttttgcgagaaatatttaagaatgattaataaaaaaaataaaaattaaaataaaaaaaaatatatatatataataaggaaatagtaattttagaagggaaaatataattattgaaaaaaaatttattagagatgtttaatagtagatttgaataggtagaagaaagaattagtaaattcgaagttaagttattttaaattatagattttgaggaatagaaatgaaaaaaggaataaaaaatagtgaatagagtttaagggatttgtgggatattgttatgttgattaatatatgtagagtttagtaggtagaagaattagtaaattgaagataggttaattacgattatgtaatttgaagagtaggaagaaaaaaaaataaagggaaatgattagaggttatgatatttttgtatagtattaagtggattgatagatgtataatgggagtttttaaagtagaggagagatagaaagagagagtaaaaatatagggtaataggtgaaattttgttaaagttgataaaaatttgtgaatttattaagtagaataaatttaaagatatttaaattaagaaatattataattaaattgttgaaatagaagtagagagaatttggatagtagtaagaaataaataatgtattatgtataagggatttttattgagattaatagttaattttatattagaaaatattgaggaaagttagagtggtatgatatgtttaaagtgttataaaaataaagttgttaattaaaagttttatatttagaaaatttattttttaaaaatgaaaatatgtagttttgtaatatgaaaggagttttggagattggtttgtaaaatagtgtgagtgtttttagtattattgaatattattattataaatggttaagatggtaaattttatgttatgtgtattttattataattaataaattaaaataaatgaaggagaaattgagatgtttttagttaattaataattaattgaaagattttattgttagtagattttttttataagaaatattaatgtgagttatttagattaaaatgaaagggtattagataatagtttagagatatataaagagatatatgtaaagaattttagtaaaggtgttaagataatttaatgtgttaaagtatatattttttatttaatggagttgggtatttggatgtttatattttaaaggatgaagttgaggggttggaagtggtgattttatttgtaattttagtattttgaggggttgagataggagaattgtttggatttaggagtttaaggttattatgagttttgattgtattattgtattttagtttgggtgatatagatattgtttttgtaaaagaaaaaaaataaagaagttgaaattttattttatagtatatgtataaattaatataaaatggattagagatttatatgtaagggttaaattataaaatttatagaagaaaatagagagggttttattttaataatttttttttgtttgtttatttttgaataaatattttatttttttaattattatggtttttaaatatttgttgatatttgatagtttaagttttttaattgtgtttttttttaatattgttttggttattttaagttttttatatttttgtatatattttagaaggagtatgttaatttttataaaaaaaattgttgggagttttattataattgtattgattttatggattattttgtggataaacggtattttagtaatattgttttttttatatatatgaaataattatttatttaatttgttttagtaatgttttgtaattttgaatgatgagattttgtataatttttatatttatttttataatttatgtttttttgtggtattgtatatagagttatttaaagaatgttagttttttttattgtttattatttacgtatagaaatgttattttttgttttatattggttttgttaaatttatttatttttaatagtttgtttatagagttttttaaattttttttatatacgataatgttttttttgaagaagatagttatatattttatgtaatttatttttgttgttggatatatagtataatgttaaataaaagtgatgatagtggatattttttttttgtttttattttagaggagtgtttaatatttttttattaattatgattttagatttaggtatttttttgtatttttttgttgtaaataattgtattttgttagggaagtttttttttatgtttagtttatttagtttttattatgaatgtttattgaattttattaaatggtttttttgtatttattgatataattatatgttgttttatttttttttatttttggggtagattattttgatattttgaagttaaatttattatgtattttttttataaattttatttggttattatgtgttatttattttatatattatttggttttatttattaatattttaattggaattttggtggttatgtttattagattattttgatgatgagtttattttttttgtaatataattgttatgtttaggtttttgtttgatttatgttgttttataaaattagttggaaggtgtttattttttattatttaaaaaatataagatagtgtattaatttgttattatattgttaataaagatatatttaagattgggtaatttaaaaggaaagaggtttaattgatttagagtttagtatgattggggaggttttaggaaatttataattatggtagaagaggaagtaaatatatttttttttatatggtagtaataaggagaagtgttaaatcgaagtagaaaaagttttttataaaattatgaagtattgtgagaatatattattatgagaatagtatgaggggaattatttttatgattaaattgttttttatcgagtttttttaataacgcgtggggattatgataattataatttaagatgagatttgggtgggtaaatagttaaattatagtatatagtttgttttttatgtttgtgagttttatatttgtgaatttaataattttaggattgaaaatgttatgttgttgttgatgtatattttgtagttaggagtatttatagtggttatgtttgtattgaagatgtatagatattttttttgttattattttttaagtaatatagtgtaataattatttataaattatttatattgtattaggaattataagtaatttagagatgatttaaagtatatgggaggatgtgtatagttaataggtaaatattaggttattttatatatgggatttgagtatttatggattttggtatttataggtgttttagaatttattttaaaaggtattagaggaagattgtataaggttgatatgttttttaaaaagtttttgaaagaattgataggtgaagaagtttgggtatggagtttttttggtgggaaggaatgtatttagaatttaattttttaatggatataggattatttatattttttatttagttttttgttggttttgtttaatcgttttttttaagaatttatgttattatatttaaattttaaaagttttttttatgaagttgtgtttaatttttttttatttttgttttaataaaatttatagttttataatgtttttttttatagtgtttatttgtgttttttttttttttatgattaatttttttgggaattttgaaatagtttgtttatttttttttttattttttttaatatattaattataaatattttgaagaatgtttttgtttgttgattttaatatttagattatttttgagttggtttttgttgattattttttttttagttgttgtattttttttgttgtttggtatggtatatattttatatgatggattttagaggttttgggttttgttatttttttttaaagattggtaatagtttgatagttaggtaattattaaagaattatttttagtaaaaattagatttattttgattttgtttttttttgattttagtttttgttagggtgagtttattttagtgtggtttttattttaaggttacggtttttatttatacggtttttttattttgatgttttaatataggttttgtagggttgaaattttaatatttttttatattatggagtttgtgatatttttatttagtatgtaatttttaagaagttgttttttagtgggttttttagagtgttatttggagtatatgtagtttaggagtgtagattttgggggttttttgtttgtaatttttttttttagtattttatttttaaattttagttaatgtgttaagtttgaattttgatttttgttttttttgtcgatgagattgattttttttgtttgggttttatttttttttattgtattttggtaaatgtttttggaaagaaagttgataaggatgtgaattttttttttaggaatttttattttttaaaaggtgatagttttgtgttggttgttgttttgtggttgtataattgtattgtatgttttttgtgatttttatatttgtttattgttggaggatgagtttaaaatgagttattttttgacggtttgaattcgaagatttttaagtttttaatggtcgtttgtattttaaattttgtatggggtaatttgatattttataggaaaagttaatatgtttttattttggtgtttagttgatattttaattttagtgttaattttatatataaaatataaatatatatatatatattttattgtgttatagagttatgtattgtataatgatgtttgggttaatgatgaattgtatatatgattgtcgttttatgagagtttaatggatttgaaaaatttttattatttagtgatattgaagttattataattttatagtatgatgtattaattatgtgtttgtggtgatgttgttgttaataaatttattgtattgttagttttataaaaagtttagtatatatagttatgtatagtatataatattttataatgataataaatgattatgttatgttttatgtatttattatattttttattgttattttagagtgtgttttttttatatatataaaaaaattaaaatagttttagttaggttttttaggaggtattttagaagaaggtattgttattataggagatgtagttttatgcgtgttattatatttgaaaattttttagtgggataagatgtgaaggttgaagatggttgatattgttggttttgattttgtgttagtttatgttaatgtatgtttttatttttattaaaaaagattaaaaggtaaagataattaaataggaataagtttttagaatgggaatataaagaaaaatatttttgtagagttgtataatgtgttgacgttttaagttaagtgttattataaaagagtagaaaagtttaaaaagtttataaaggattttatgtttaaaatattaagtaatggtaataaaagttaaaattgataaatgggatttaattaaattaaagagtttttgtataataaaagaaattattattagagtgaataggtaatttataaaatgggagaaaattttcgtaatttatttatttgataaagggttaatatttagaatgtataatgaatttaaataaatttataagaaaaaaataaataattttataaaaaagtgggcgaaggatatgaatagatattttttaaaagaagatatttatgtagttaaaaaatatatgagaaaatgtttattattattggttattagagaaatgtaaattaaaatttaatgagatattattttatattagttagaatggtaattattaaaaagttaggaaataataggtgttggagaggatgtggagaaataggaatatttttatattgttggtgggattgtaaattagtttaattattgtggaagttagtgtggcgattttttaggggtttagaattagaaatattatttgatttagttattttattattgggtatatatttaaaggattataaattatgttgttgtaaagatatatgtatacgtatgtttattgcggtattatttataatagtaaagatttggaattaatttaaatgtttaataatgatagattggattaagaaaatgtggtatatatatattatggaatattatgtaattataaaaaaggatgagtttatgttttttgtagggatacggatgaaattggaaattattatttttagtaaattatcgtaaggataaaatattaaatatcgtatgtttttatttataagtgggaattgaataatgagaatatatggatataggaaggggaatattatattttggggattgttgtggggtggtaggaaaggggagggatagtattaggagatatatttaatgttaaatgacgagttaatgggtgtagtatattagtatggtatatgtatatatatgtaattaatttgtataatgtgtatatgtattttaaaatttaaagtataataataaaataaaaaagtttaaaaggttatagaaagttatggtaattaattattaattagttattaattgttaataaataaataataaaattattagttaattattaataagttaatttattattaaagaaagataatgttaaaattaatttagtgtagtttaagtttataaagtttaagtagtgtatagtaatgttttagtttttatatttatttattatttatttatttatttagggtatttttagttttgtaagttttatttatggtaagtgttttagatagatacgttattttaaagatttttttgttaattatatttttattgtattttttttttgtttatatatgtttagatttataaatatttattattgtgttagaattggttgtaatgttttatacggtaatatgttatataatttgtagtttagaagtaatgggtttattacgtagtttaagtgtgaagtaggttatattatttaggtttatgtaaggatattttatgatgtttatatatgataaaattatttaaggatttattttttagaagttattttattattgagcgaagaatgattgtatatgtatgtaagttttttgaagtttaaatatttttaatttgatatatttgtgttttatttaagaaatattttttattttagtagatgtgaaaaaaaaaaaaggttggtatagtgttttatgtttgtaattttagtattttgggaggttgaggtgggtggatcgtttgagtttagaagtttgagattagtttgggtaatatggtaaaattttatttttattaaaaatataaaaaggagttaggtattgttttatatgtttgttgttttagttatttagggggttgaggtaagaggattatttgaattttgggaggttaaggttgtagtgagttatgatcgggttattgtaatttagtttgagtgatagaatgagattttggttggaaaaaaaaataaaataaaaaagaaagatttttttatttaaataatttaggttatttttttaataattttggtagtaattttatttttttatatttgtttttattgtttatataattttttgtttatattaaggtatagagatataatttaattatggtatgtttagtagattatcgatgttgggaaagggtttaggagatgatgatgaattaaaatatgggatagaggttgggtacgtggtttaggtttgtaattttagtattttggggagttaaggtgggtgaattgtttgaatttaggagtttgagattagtttcggtaatatagtgatattttatttttataaaaaaattttttaaaaaattagttgggtatggtggtatgtttttgtagttttagttatttatgaggttgaggttggaggattgttttagatagggaggtcgaggttgtagtgagtaatgattgtgttattgtattgtagtttgtgacgtttgtttgtttgagatagggttttattgtgtttgaaaaaattaaataaataaaaattaaataaaaaatttataggatagaaatttttatggataataatatatgaatgaaaagaaagaatgatagagattaaattaatgaagttatttttgtgtggaagattttttgatgattttgatgttttttttttaaggaattttttttttttttttaggaaatatgtatgatatgaattatggtaaatggtttttttttttgatttttgaatttttggtttttttttattttcgttgatattaggatatttttgagtattataaaggttttgtaattatagttatttagaattttgaaaaacgtagttatttttttttaaattagtatttgttaaagttgtagagagagtattttttggtttttgggagatagagaggatgaagggggtatttatgtatagaatatttattttaatatttttatttttattagtttttagtttttttttatatattatattaaaaaattttttatatttaattttgtttagttaggttacgattaagttaaatttaaaagtaatttaatatttagatttattttgagtgtggaaaattttacgttgttttttattgtttttatattataataattattaatatagaagatttttttgattaaatgtagggaatttttttaataaataagtaattagttttgtgatggatattagttgggtgttttttaattgaattttgttattttttttttggagatagtatcgtattttatgggttgagagtttagtttttatgattgttttttttttatttttgatgttagttttaagttttttatttttgatgttagttttaagttattttgttcgtgtttttaattaatttgttttaaattagtgtttttataatttgttttttaggtttgattaatttgttagaatggtttatagaatttaggaaaatatttatatatatttattagtttatttaaaaagatattttaaaagatataaagagttttatgaatagatatatagggtaaggtgagaagggtttttagtgtaggagtttttgttttatggggttgggatgcgttattttttttggtatatggttgagtttttgtttattttttgttagtttttttgtgtttagttatttagaagttttttaaattttgtttttttgggttttgatggaagttatattttttaggtatgatttattaaattattggttattagtttaatttttagttttttttttttttttgttaatgaaatgattttatttttagaaaaatttgaagattttattaaagaattattagatatgataagtaaatttagtagagttgtgggatgtaaaattaatatataaaaattagtataatgtttatatattattaatgaagtagttgagaaagaaattaaaaaagtaattttatttacgataattagaaaaaaatgtttaggaataagtttatgtaaggaagttaaagattttttaaaaataaatttatataatattgatgaaagaaagaagaggatataaataaatggaaagatattttatgtttatgaattagaagaattaatattagtaaaatgattatagtttttaaagtaatttaaagatttaagggaattttaataaaaatattaaggttatttttttatagaattagaaaaaataattttaatatttttatggatttaaaatatttttaaaaagtttaaatagttaaagaaattttgagtaaaaagaataaagttagggttattatattatttgattttaaaatatattataaggttatagtatttaaaatagaatggtattgatataaaaatagatatgttaattaatggaatataatagagaatgtagaaataaatttatatatttatagttaattgatttttaataaaggtgttaagaatatatatttgggaaaaggatattttttttagtaaaagggttgggaaaatggatatttcgtatgtagaagaatgaaattagatttttattttttattttattaaaaattaatttaagttgatttaaataaaatgaaagatttgaaattataaaataattggaagaaaataggggaaatattttaggttagtggttcgggtaaaggttttatggttaagattttaaaaatatagaaaatataaataaaattagataaataggattataataattaaaaaagtttttgtatagtaaataaaataattgatagagtgaagagataatttgttgaataggagaaaatatttttaaataatttatttgataagggattaatatttagaatattataagaaatttaaataatttaagaattaaaaaattaaataattttattaaaaagtgggtaaagggtatgaataaatattttttagaagaagaatataaatggttaatagatatataaaaaaatgtttaatattattaattattagggaaatgtaaattaaaattataatgagatgttattttattttagatagaatagttataattgaaaagataaaaataaaataaataaaataaaataaaataatagatgttggtgatgtggagaaaagggaatttttgtacgttgttgataggaatttaaattagtatagttattatagaagatagtatggagagttttaaaaaatttaaaaatagaattattatattatttagtaattcgggggtgggtttggaaagtgttggagtttagggattagggttggtagagagtagggtttgggggtgtttgggtagttggaggagaatgaaggaggtagatgtttgggtattagggtattaaagtgagggaagtgcggggttgttttaagagggtaggagattaatagaagaatttttgagatttgttgggaatagggaagggtggaatttttaggatttagggtaaggggttagaattttgggttaggtttatcgttgagttttttgtaatttattattatttttagatttttagttaagttgtgtacgtattttttaagagtatttttttggttgttagtagagggatttgttttttgtttgtgattttgtggttattgggtttggtaaggtagtttttgttgttaaagataatgaagaggtagttatttagtaagtcgagtgttgtgattttaggtttttcggggttggattttgttaggatagtaaggttcgagtatagaaagtggggtttttaatttattagggttgggttttttagtttttgttttttatttttttttttttaggattttaggaatttttttttgttttatatatatttatatatatatatatatatatattttttttaaagaaatattttttattttttttttttttttgattttttttattttttttttttttttttttttttttttttttttttttttataaagaaaaaggtttaattgatttatagttttagtgtttggtatgattttttttttttttatgatttattttattttttttttgttttttggagttttttttttttttggatcgaggttttaaggttggagtttatagattgatttttgggatgagtagtttttatttgtaggagtagtggtaggaataagggaggggataggaggttaaggttttattttggaggttgggggattgggtcgtgtattagtaagggtttggggttgagttagttttagatttgattttgttgttttggtttggaggtttttttttgttttgagataaaagtttagttaattagttgtgggagaaaacgtttatattaatatggattttgggaagttggatgaatttagagtttgatacgagatcgggagatttttttttgtgtagagtttcgtttaggtgcggggaatagggggagagtttgggacgttttggttggggagaaaggggagcggggttttttgtttttagttttgtggttatacgggggcgtcgttatattgttttcggattttgattgagcgttttcggggattaggttgcgggttgagtggggtagacggggttgattttgaggttatttacgttaggatggaggcgttttttgagtagttttggaatttataggatttaggttagatttgtttgttttgtaacgtgaggtaattgtgaagtaataaggtttggttttagaatttttatggcgaatacggttgttataaaatttaattagaatgagagtttagcgtttgagttgattgttttgggtatattcggttttgacggggttgttaaaaatttaattttggtatttatagaaattttaatgattgtggaaaatttcgaataagtgtgtacgattttatttttgatgtttttggcgtttttgaaaggttagaaagagttatgtaaagaggttgaaaggtttttttgggaatttttaaatttttttttatagtagtaaattgtatttagagagttaagattgaaggatatagagagaaggatttggagacggagtcgttttttttgagtagtacggacggggttgttagggcgttttttttttttgtgtttagtaggatggattttgtagtgaggcgtagtttttgtttttcgggagttttagggttatatattttttcgatgttttatgttaggagtatttttttttttattttgttttttacgattttttttttttttttgttttgtggttattaatataatagatagataagattttataagattagataaaagatgttattgatgatggttaagatatgattatgaaggaatagtggaagatatagatagagtaagagaaagagataaaatatagagaaagaatagaaatagaaaaatatagaaaaagaatatttatttatttatttatgtttttgtttatttatttatttttttgtaaggtaggtatattaatatttttttttttttgagatggagtttcgttttgttatttaggttggagtgtagtggtatgattttagtttattgtaattttcgttttttgggtttaagtaattttttgttttagttttttaagtagttgggattataggcgtttgttattatgttcggttaatttttgtatttttagtagagatggggttttattatgttggttaagttggtttcgtatttttgatttcgtgatttatttatttcggttttttaaagtgttgggattataggtatgagttatcgcgtttagttatattaatatttttaaatttatgttttaataaaattataagtttttttttgttggtttatatttgttttttttatttagttgattgatgtatttgttgaagttttgttatgttttgtattgggtattgagtattggagtttaaataggaatagatttttgtgatgtatttatatggggttttttattgtttcgtttttggttgtgagatatttttatttttttgaggtttttttttttggttattgggagaagttttcggttcgtttttttattgatatttgagagattttaatattttggaatattattattttcgaatcgagtattgatttttagtatttattttgtgtttattatttgagtattaaatatttttttgatgatttttttatttagaagttgttagagaaggatgtggttgtaattttaggtatgttgtttaagagaaatttaaaaattaggaaaatttatggaaagggttttttttgtttatttttagaatattttttgtttatttttttattgagtttgattgttggaaaagtggtttttatattttttgatttaatgtaagtagtggaaatatttgtttagtgaataagtattttggaaaatgtttttagaattttatatattagaaaaatatgtgtgtttttttgtttaattttggagttgttaatatgttatatgttaattttttattgattttatttaagttttttggaagagaatggtgtttttaaaaatgttttagtggtatgggatagtaaatttttttgtgtttattgtaagaaagtatataatttaattttttaattttattgagtatttgaaaatgaattgtatttttaatgtatttttttttagagagtatattgtagaggaaatttgtttaaatttataaatgattttgagttaagaagttaaatatgaggttttttaagaaaagttaagagattttttgattttaaattttatgttgtatttataagatggagttgttagtatttgtttttatttttgggtattcggtagaatgtgttgttttttgggatttagggagatagttatttatattaggagtattaaataaatttttaggagggattttatggtttatttaggagtttttttaagtaatttttttttttaaataattttgaagttttagaaattaattaagaaaaaagatatttatgtttttgatttaaaaaaaataatgaaatgttaatagtttagtatttaatagggaagttatgagattatattttttgtatgtggagaagatatatttaatggagaaatgggaaattgttttaaaagtgttgggttatagtgagagaatgtggttgttattattattatttattgtttatttatttagtaatttttttttattttaataaatatattaatgatgagaaatattttgtatttttttttattgtaataagtttattattatgttattttttgtggttgatttttttatttaaggatgatttttgggtttgtgatgggagaggttgttgtgaaagtttttgatattttttggagatattttttttattgttatggtgattgatattgagtttttttttattgatgtaaatttttgtagtgggtttgaatttttttttagaaaatgggtttttattttttattgtattattaggatgcgaattttttaaatttttatgttttgtttttttttgaatattttgttgtttagaaattttttttggtagatatattaaattattttttttaagtttaaagttttatatatttttagggtaggggtaaaatgttgttagttttattgttaaagcgtagtaagaattatttttattttagtttttaataagttttttatttttatttgaggttattttagtttggattttattgtttatattattattagtattttggttaaaattatttaataagtttttaggaagttttaagtttttttatatttttttgttttcggagttttttgagtttttaggaagttttaaatttttttatatgtttatgtttttttttgagttttttaatttgttttaatttttgtttgttatttagttttaaagttatttttatatttttgggtatttttatagtagtattttatttttggtattaatttattgtattagtttatttttatattgttatgaagaaatatttgaggttgggtaatttataaataatagaggtttaattgatttatagtttcgtattgttggggaggttttaggaaatttataattatggtagaaggtattttgttatatggtagtagaagagagaattagtgtaattaggggaaatgttagatgtttataaaagtattagattttatgagagttattttattatgagaatagtatgggggatttgtttttatgatttaattaatttttattatattttttttatgatatatgggaattatgggaattataatttaagatgagatttgggtgggaatatagttaaattatattattaatgtattatgaaagttaaatttatatattttagatgttttgtgaggttgtttagaaagtagtttggagataatttttataggaaaaaattaaataatttttttaagatgatattgtatttagaattttatgtttgttattattaaaatggggttatttaatttaattatttagaaaattaagtgtaggtgagttatgttggatatatttagttattattttttaataatattatgaaatggaaaaaataaggtattaaggtaataatttgtatgatgaataaaatagtattttatattttaatgttaatgttgaatgttaataatttaaatgttttatttaaaagatatagattggtagaatgggtaaaaatttattaatcgagtatttgttgtttttaagagaatgtttaatatataaggatttatataaattgaaggtaaaggggtggaaatattttatgtaaatggaagttaaaagtgagtaggagtagttattgttatattagataaaatagtttttaaagtaataatagtttaaaaaaaaaaagataaagaggaatattatataatgataaaaggattagtttaataggaaagtattataatttttaatatatatgtatttaatattaggggttttaaatttataaaataattattattggatttaataaatgagataggtggtaatataataatagtgggggattttaatattttattgatagtattagataggttattaagaaagttaataaagataaaatggatttaaattatattttagaataaatggatttaatagatatttatagaatattttatttaataattgtagaatatatatttttgttattattatatggaatattttttaaggtagattatatgataggttataaagtaagttttaatatatttaagaaaattaaaattatattaagtatttttttagattatagtggattgaaattggaaattaattttaaaggaatttttaaaattgtgtgaatatatggaaattaaataatttgttttttaatgatttttgagttaatattaaaattaagatggaaatttaaaaattttttgaattgaatgataatagtgatataatttattaaaattttggaatatagtaaaagaagtattaagacgaaagtttatagtattaaatgtttatatgaaaatgtttgaaagagtataaaaagataatttaaggttaaattttaaggaattagagaaataagaataaattaaatttaaatttagtataagaaataaaataataaagatttgagtagaattaaataaaattgaagtatgaaaaatgataaatgaaataaaaagttggttttttgaaaagataagtaattgatagattattagtgaaattaattaagagaagaaaagatttaaacgagttgaagtagaaatgaaataggatatattataattgatattatagaaatttaaggttattatgaatatttttatatatataaattagaaaatttagaatagattgatattgataaatttttggaaatatataattttttagattaaattaggaaaaaatagaaattgaatagattaataataagtagtaagattgaaagagtaataaaaaaaaaattgttaattaaaaaaagtttaggattagatgaatttatagttgaattttattagatatttaaagaagaattggttttaattttattgaaattattttaaaaggtaaagagggtattttttttaaattattttatgaagttaaaagtaggaaaagatataattaaaaaagtaaattatatattaatatttttaataaatatagatgtaaaaatttttaataaaatattggttaatttatttaatagtatattaaaaagataatttattatgattaagtgggttttatattagggatgtagggatggtttaatatacgtaagttaataaatgtgatatattatataaatagaatgaaaaataaaaataatattgttatttcgatagatatatgtattagttacggttttttagaggaatagaattaatagtatatatacgtgtgtgtgtgtatatatatatataagagtttattaagtattaatttatataattataagtttatataataggttgtttgtaagttgaggagaaaggagagttagttcgagttttaaaattgaagaatttggaatttgatgttcgagggtaggaagtatttagtatgggagaaagatgtaggttgggaggttaggttagttttttttttttttaagtttttttttttgttttatatttgttggtagttgattagattgtgtttattagattaagaatggatttgttttttttggtttattgttttaaatgttaattttttttggtaatatttttatagatatatttaggattaatattttgtattatttaatttaattaagttgatatttagtattaattattataagtttattttttgttaatttgaatttatatttattttttgagattatatataatttttaaataaagataataataaggttataattatattaatataatataatgatttttcgtataattagaaacgtattaatttttaagtattattatataaagttaataaaatttaaatgttgatatgaagttaataaattttatgttatatgataaaggaaaaggaaataaaataaaggtatttttttagtttaagtgtatatatgtataaatatgatttttagtaaaagaaggaggaaatatttatgattattgtagtttttgtttttgtaggtggttacgtgggtatagttggtattgatgattatttttttttattatttattttgtattttttttgtttttagtaagtattttagtaggttgtgttttttttttttggtggagtgatttaaatttatatttttgagggatttgggttatttgtagttttgttcggatcgggttgttgtagttttttattgattttaattatagggtatggtaatattaagaggtattttaatggatcgtttgtattttatgtatatttttttttatttttgttgtggagtagtagattgattttattttgatagtttaggttaattacgttagttaatattgtaattttttttatagtttgttgatttaaatgtaggaggagtttaaagtatttaggtggtaattttaatttttagtttaatgaaatcgatgttgtgttttttggtggtagtatttttttttttggaattaagatttttaggttagtagaatataatgttgtgggagtaggaagtaaaaattttgttagtgggttattaggggtgatggtgagtgttgttatttttaatttttgatttttgtattcgagaattttggttatgggagaaatattattttatattggatgttgatttagagtatatatagtttttcggagaattttgttttagttttgtaaagtatcgttatttagttggtattgttattgtgattttaaaaggttattatattattttattaatttagttgttttaggatggagaatatggtaagattagtgaattttatgagtatgagtttattgttgtatttttttagttatgaagtgagtgttttggttagaggtaatgttgtgtggaatattataagggtggataaggtattttgtgattttatgatggtagttttggtagaagtattgtatgtaggataggtaaatttatattcggagtaagtgtttattttagtgaagataaatttttgttttttttataatggaagaggtttaataattaatttgttattaggtagttggttgatcgtttaaggaaaggtgttatattgagagtttagtgttggtttttgttgttggtaaattgggtatttagaagtggttatagttaggttagttttggtgagtgaaagtttatgttgttaagtttatgtatattttttatttttattgttatagttattttgtttattggtttattgggcgatgatagaagtggttgggaaaatagattgagtggtgtttatagaacgggttattttatttgattattaaaatttttttttgtttagattatttattggtgggtatttatatgggatataaatatttttgtgggttttgattagagaggtttatttataaattttttttttaaatttttttgttattaattttttaattatgttttttttaagtttttgattttttagttaaattattggttatagtttatgaattagtatataatcgtatatttggttattttttattttatgtaaattgtataattaggtgaattgtttattaagaagatttttttttattgttgttttttagggatgttttagaaaggggttgtagtgttgtagttgtttatttttgggtggtgtttttatatcgtgtagaataatttgtgaataaggttttatttttttgtttttttgttaattgattatagggaattttttatgaggttatcggtgtaggttgaggaagagaaagtagggtggtaggagtggagattttgggtatttgagttatttttttatgtattttatttgtgttttcgggatttgtttgagttcgattatgtatatgttatttttatttgatgatggaatgttgttgtgtatgatttattttatggttagattagttataaagtatttagtttatgataggtagtttaggttgtatggtgatttgatgatttatagttaaatgtttagtttttattaaagtttagtaataggttaaggttaagagttgttttttaaaaggagagtagttatttgtagaagatggtagggttttgttttaaaattttggaggtttttgttgtgatttaattatgtgggtttgttaaaggttttaatagtatttttatttattattgatattttaaatattattgggtttgttgggttatatagtttaaagggtagagtagtttgtatagtagtttggatatgttgtagagtttttttttgttttgtattttatttaaaattggtagttttttaggttatttgataaatgggtcggagtaatatatttaaatgaggaatgtgttgtttttaaaatttaaatcggtttattaggtattgtgttttttttttggttgtaggaggagttaaatgtagtaatttattttttattttagaaggaatattttggtaggttttatattattggatttttagaattttattgaggtagaaggtttttgaattttagttagatttattttttattttttggtacgtaaatgttttattaataagtttagtgtgtttgttattttttgtttatcggatttaattagtataatgttattaaggtaatggattagtgtgatattttgtagaagcggaaagtgattaaggtttttttgaattagattatgatataaagttggattgttgatatatttttgaggtaggatagtaaacgtatattgtgaaggtaaattgttttttgtgggttttatggataggaatggagaaaaaggtatttgttaagttaatggttgtatattaggtattaggagatgtgttaatttgtttaagtaatgaaattatatttggtgtagtagttgtagttggagtcgttattatttggttaagtttataataatttattgttattttttaagatttgtttgttttttgtataggttatttgggagagttgaatggggatgtgatttgaattattatttttgtgttttttaagttttttatggtggtattaattttttttgtatttttagggatgtgatattgttgatttattatttttttaggtaaaggtagtttcgatggtttttatttggtttattttattataatattttttattttattagttagtatgttagtgtgggggttttgttagttgttaattatttttatgttaattatgtattaattggggaaattgtattggggaaatgatgtattaattgggaaaattaattgggaaaatgtattaagtggggaaatgattataggatgagtttggggatttattgtatttattgtaagttagatttgagttaaaattttattaattatttgaattttataagtttttattttaattggagggttataatgatgttttgggttttttggaattaatgttagtttagagttagtgttttgtatttttgaaatatttaattatttttttttttttagtgtatagttattttggtaaaaggttggaggtttttttatagaaggatggaagaagatttattgtataaattgttagtaatgtagtggggtttttttttaaggagatttagttttttttttatttaaggggttttgggtttgtaaattggtttaagtttggaaattgattgaggggttatgattttttgtttttatgattaaaattagttttttgtttattgtatatagaagttttttgtttgtataaattaagtaggaatgaagtaggttttttattaattttatttttaggaatattatgattaattagttaatgttagagttttgtatgagttggattattatgattgttattttgtttttgttgtttattatggtagttatatttattttgtttttgatggttgaatgttgttatttggtttttgatatttcgggatttaattatttttattgtatttaaattttatagttgagtattgtgatttttattgttagttttgatatgtagagaagagtaattatagggttttttaaagatgtaggtgttgtttttataaatttattttataaggtattggttaagggtaaattttttagatttttttagttgggatgagtaggtttaaattgattaatttattttattattttaatttttttaagttttttaatttttttttttatattaaattaagggagattagatatttttagtttgtttatagtgggttattttttaatttatattttagttaattaagaaaataaattattataattttttttaatttttcgagttgtaatattaaaagtagagtttttatttaatggtttaaattaataaatttagttttatttaattttatgttttttttattattattttatatttgtaatatttatttttatgtttgttttttatatttttattgatataaattagaaaattgaaatagttttttttgagtgtagtgtatttttttatgggttatatttttaattttatttttaggggatcgttgggattttagtttagttataggtttagaagtaaatagaggtgttaggggtggtttttgaggagaattaatattattttgtttggtaattgttttagggtaggttattattgttgttttaggtagtgtagggtttgtttttttagataaaggtggaaaggttgatgatagtatgggttggggaggggatgttgttaatattagggacggggaagttgatttttttagtaaaaaaagttttattataatttatatatttagtgtttttagttttattaggatttttttatatatttttattttaagttgtagggttttatttttttttgattaatgtttttattttaatagtagatatttggtgaggttgtgtatgtattttttatcgtaggttagttatttatatgataggagtttttgtttgtttttttataattttagttttttttttataggagataagattgttatttatggggtaattttagtagatttgaggtttagtatttgtttttgaagttgggagatagaatttttgagtttattatttttttttattattttgtttattgaatttaggagtaattaattagttttattatgttttttggttttttatatatggttaaaattattaggttagagttattaaatttgttttttaggagtagtgaatagtgtgaaatgtatttattttgcgttattttttaaatagtttatgttagggattattagtattttttatattattagaagtagagtttttagtatttttgggtttaattatattaagtaattaattttagaaatttttaaattaataaaagaattttatttttaatattttgtttttttagaattatttttgttattaaaatttgtattagttaggttttttagagggatagaattaatagaatatatatatatagaatatatatatatatatatagaatatatatatatagaatatatatatagaatatatatatagaatatatatatagaatatatatatagaatatatatatagaatatatatatagaatatatatatagaatatatatatatagaatatatatatggaatatatatatatagaatatatatatagaatatatatatagaatatatatatagaatatatatatagaatatatatatagaatatatatatagaatatatatatagaatatatatatagaatatgtatatagaatatgtatatatagaatatgtatatagaatatatatatatagaatatgtatatagaatatatatatagaatatgtatatagaatatatatatagaatatgtatatagaatatatatatatagaatatatatgtatatagaatatatatatagaatatatatgtatatagaatatatatatagaatatatatgtatatagaatatatatagaatatatatgtatatagaatatatatgtatatagaatatatatatagaatatatatatatagaatatatatatatagaatatatatatagaatatatatagaatatatatatagaatatatgtatatagaatatatatagaatatatatatatagaatatatatattatatatatagaatatagatagtatatatatagaatatatatatagaatatatatagaatatatatataggatatatatatagaatatatatataggatatatatataggatatatatataggatatatatataggatatatatataggatatatatataggatatatataggatatatatataggatatatatataggatatatatatataggatatatatataggatatatgtatataggatatatatataggatatatatatataggatatatatataggatatatatagaatatatatataggagatatatatagaatatatataggagatatatatagaatatatataggagatatatatagaatatatataggatatatataggatatatatatagaatatatataggatatatataggatatatatataggatatatataggatatatatataggatatatatatgtaggatatatatgtaggatatatatataggatatataggatatatataggatatatataggatatataggatatatatataggatatatatatagaatatataggatatatataggatatatatagaatatatagaatatatataggatatatatatagaatatatagaatatatataggatatatagaatatatatagaatatatatatagaatatatatatagaatatatatagaatatatatagaatatatatatagaatatatatagaatatatatatagaatatatatagaatatatatatagaatatatatagaatatatatagaatatatatgtagaatatatatagaatatatatgtagaatatatatagaatatatatgtagaatatatatagaatatatatgtagaatatatatagaatatatatatagaatatatatagaatatatataatatatatagaatatatataatatatatagaatatatatatagaatatatataatatatatagaatatatagatagaatatatatagaatatatagaatatatatagaatatatagaatatatatagaatatatagaatatatatagaatatatataatatatatataatatatatataatatatatattatatatatataatatatagaatatatatagaatatatatagaatatatagaatatatatagaatatatatagaatatatatagaatatatagaatatatatagaatatatatagaatatatagaatatatatagaatatatagaatatatatagaatatatatatagaatatatatagaatatatatatagattatatatatagaatatatatatagaatatatatagaatatatatatagaatatatatatagaatatatatagaatatatatatagaatatatatagaatatatatatagaatatatatagaatatatatagaatatatatagaatatatatatagaatatatatagaatatatatatagaatatatatagaatatatatagaatatatatatagaatatatagaatatatatagaatagatatatagaatatatagaatagatatatagaatatatagaatagatatagaatatatatatagaatatatatagaatatatatatagaatatatatatagaatatatatatagaatatatatatatatatatataaaatgtaagttagtacgttatatatatattattttatatataatatatattatgttagtatttaatattaatagaataatataataatagaataatatatattataatatatattatatataaaatatatataatatataatatatataaaatatatataatatataatatatatatatgtttattgagtattaatttatataattatagggttatataataggttgtttgtaagttgaggagtaaggagagttagtttgagttttaaaagggaagaatttggagtttaatgtttaagggtaggaagtatttagtatgggagaaagatgtaggttgggaggttaggttagtgttttttttttttttgtttttttgtttgttttatgttaaatggtagttgattagattgtgtttattagattaagggtggatttgttttttttagtttattgttttaaatgttaattttttttggtaatatttttatagatatatcgaggattaatattttgtattttttaatttaaattaagttgatatttagtattaattatgtataaaaaatatttgataaatattttataaaatttagtattgttttatgattaaaagttttaataaagttggtatataaggaatatatttgaaggtagtaaaagttatttatgataaatttataggtaatattatattgaatgagggaaattagaaattattttttcgataattgaaataaggtaaggatgtttatttttattatttgtttttaatattgtattgaaagttttagttagagtaattagataagagaaagaaataaagggtattcgaattggtaaagagaaagttaaattgttgttgtttgttgatgatatgattgtatagttagaaaattttaaagatttatgtagattaatgaaatagaatagagaatttagaaataaaattaaatatttatagttaattgatttttgataaaggaaatgaaaatataaagtggggaaatgatattttatttaataaatgttgttgggataattggtaatttatatgtagaagaatgaaattggattttatgttttatcgtatataaaaattaatttaagatggattaaagatttaaatttaagatttgaaattataaaaattttagaagataatattgaataaaatttttttagatattggtttaggtaatgattttatgagtaagaatttaaaagtaaatgtaataaaaataaaaataaatttatgggatttaatttagtaaaaaagttttcgtatagtaaaagaaataattaatagagttaatagacgatttatagagagggagaatatatatataaattatgtatttgataaaggattgatgtttagaatttataaggaatttaaataaattagtaagaggaaaatgaataattttattaaaaagaaggttaagtataggaatagaaaatttttaaaagaggatatataaatggttagtaaatataaaaaaatgtttagtatttttaattattagggaaatgttagtgaaaattataatgtaatattattttatttttgtaatagtggttataattgaaaaataaaaaaataataggtgttggtgtggatgtggtaaaaagggaatatttttatatagttggtaggaatgtaaattagtataattattatagaaaatagtatggagattttttagggaattaaaagtagatttataattttatttagtaattttattattgggtatgtattagaggaaaagaagttattatatgaaaaagatatttgtatatatatgtttatagtagtataatttatagttgtaaaaatatggaattagtttaaatgttcgttaattaatgagtggaaaatgaaaatgtggtgtatatcgtggaatattgtgtagttataaaaaggatgagtttatgttttttgtagggatatggatgaagttggaaattattattttgagtaaattattataaggatagaaaattgaacgtcgtatatttttatttataggtgggaattgaataatgagaatatttggatacggggtggagaatattatatattggggtttgtcgtggggttgggggagggaagaggggggagggaaagtattaggagaaatatttaatgtaaatgaagagttaatgggtgtagaatattaatatggtatatgtatatatatgtaataaatttgtacgttgtgtatatgtattttagagtttaaagtataattaaaaaaaataataataaaaaaataaaaaaattaataatttattgatagatatatttaagaatgtaaatgaatttttgaatttttagggaattacgttgagtgaaaaaaaaagttaatattaaaagaatatatattgtatgattttatttatattatttttttgaaatgataagtttaatagaagtagagaatatgttagtggttgttaggggttaggtatggaagcggggaaaggttagtgtgattataaaagggtaatatgagggttttttgtggtggtagaattgttttgtgttttgattatattaatgttagtgttttttgtgatattatgttgtagtttgtaatatgttattgaagaataatgggtaaagaatgtatgatatttttttttattattattattattttattggtaagatatagggttttgttgtgttgtttaggttggttttgagtttttggttttaagtgattttgttttttttattttttaaagtgttgggattataggcgtgagttattatgtttgttttttttattattttttatagttatatgtggatttatgattattttaaaataaaaagtgtaattaaaaaaaagaaaatgtggtgtatatatatatatatcgtagaatgttatttagttataaaaagaagtgaaataacggtaattgtagtagtttgaacgacgttggaggttattattttaagagaagtaatttaggaattgaaatttaaatgttatgtgtttttatttatatgggtatgtaaaggtaaaagaatgatataatgaacgttggggatttagagggtagggttataggatggtgcgggagaaaagattatatattgggtatatgtatattttttagatgatggatgtattaaaattttagaaattattataaaagaatttatttatgtaattaaaaattatttttttttcgtaaattaagtttatttttaaattagtagggtatattttttgtttgttatgatttatggttttaggatgttgatagttaaggaagtagtttggtaatatttgtaaggataaatttttatgataataaaatgtttagatattttaatattatagaatagtatgtgttttaaaattgattttgtaattgatagaggagttaaaaagaaattatttaggtagatagtgagagtaaagaagtttttggtaaggttttttttttaatgaaaagtagtttttaaattattttttttttaataaagagtagtttgtaaaattgagttgtagatatagataagtaagttggaagtttgtttgagtgaatgttagtagttgtgttaataggaaaaggttatttgggattaggtatgtttaaatggcggttttatttttattttttttttttaattacgtgtgtagtagggagtagataatatggtgttagttaagtggaaagtttatttgtataagaagattagggtggggtggttagtttttttatgtattatgtaaatattatatttggtttaattaatttgtgggttttgtgtaaattagatattttttttagtttgtgtataaaatttagtgtattttgttatgggttggaatttttatttgcgtgtttttttttttataggagagagagttatttttttttttttttttttttttttgtttattaaatttttatttttaaatttattttttgtgtgtgtttgtgtttttaatttttttggtatgaggtaatgtattttaggtattattttagataaaggtgttgttttatttttggtgtttatttaggattttaaggtatatttattagaatggtgagtataggagtagatttttattttgtttttttattttgaggtttttggtttttatttttagaattaaattaaattaaatattgggttttttttagttatttaaaaatgattagtgtggtttttagtattataagacgggagataggttttttggggagaatatggagaattttttattatttatgggttgttgggtatattggtcgtgtttgaattagtttttttttatggaggatttagttattatttggggttggaagaagttagggagtaattgaggatttttggatggagttattacgtggtattatgaaaggtttttagattgattttagttttcgaatgtttgattgggtgttggtaataggatttttaatttttttattacgattttttttttttttgtttatgattgttatgttttttattttttttttgtatataatgttgtaggaattttatagtttagggaagtaattttgttaggtaagattaggaaatgttgtagtaattagggatatagtttaggggaatgttattgtgattttttaggaatatattttttttattcgttatagtgagtatttttttttgtttttggtttggagtgtatatggagttttaaggttaatagtattagttagcggaatagaagttttatttatgtggcgtattgttagttttttgttaaaaaattttaatttattaatttttttttttttttgtatttttttattagaaattaggttttatgttgttttagttgtatgtgtttgtatagtgtgtatatgtgagtgtatgtgtgtgtgtatgtatgaagagagatagaatgaagagattaagatttttgattgaattattttaaagtaatttgttagatttatgatattttattattaaatattttatcgtgtattttttaagagtaaaaatttatattattatattaaagaaaataaataataattttatattatttaaagtttttttatatttaagtatttttatttttttaatttattttttgtatatttttataatttggttttataaaatatttatttattgtttttgattatgtgttttttagttatttgtaatttataataatttattaattttttttttttttagaatagtattatttattgtaggttaaataattttagtatgttttttatatcgaatttattatattattttttttgatgttttttattttgtttttttttttgttgtgttttttaaagatcgaggtagatttgggttaaatatttggtaataatatttttaggaggggttgttatttgtatttttattatattgataggtatacgaggttttttagggttttttttgatattataatagttaaatttattttgattttttagagatgtatatattagggttgggaatgtagtgggtataagtacgattttttggtaataggagattttgttattttttttattttttatgtgttttattaggttaggtttttttaggtttgaattttttttgtttgttttttagttttatttcgttttgtgtttgtttttttttttttttttttgtttaagtttagtttttgagtgtttttattttttaaattagtgtttttatttaggggagatttttttattagaggataggagttatgtttggagaaattttttgttgttataattgtaatagtttatgattttttgtattaggtagagggtagagattgagggaggtttttattttaaattttttattattgttaatgaagtattaaaaagaggtataaagtattgtattttttttggggatttggtagaaaagtagggtttttataacgttaaattttatagaaaaatatattattttggtaaaatatttaagttatatttttaagttttaggttgtagtttaaatataaataatattaaaaatttaaaattttagttaagttaaaattattgaagttggttgtaagggtttgtgagatttgtagttagagggaaggataatttaatttagaattgtagtagaagaacggtattatgtggttttttgaatgaattttttttttttagtaggaaattgtgaggatatttttttgggggaaaaagtagaattttgttaaatttttgaggtttatatttattatttatttgttgattttgtagatgttaattttattttgaatattttgtaatttatttttttattgtaagtggagagaatttgaatttgtttttgaagtaggaaattagggattggttatgtgagttattaatttattttgtggttggtttttttatgtagtaagtatgatagattgtgggttaataaaatttgtagtaaggaaaatcgtaaattttttattttagtttatgttttagtttgtttagtaatgatttagttttgttttatttttaatattttaaagtttataattttatttgatattgattttataagaatttatgtatttttatttttgttgtgtttgttattggaagtttttttaaaataattgtggagtaaagaaaagtaaataaatgtatggtgtattagtgtttaatgtattttgtaaatgtgttagttttatttttatagatggtgttgtaataagtggtgttgagaaattggatattcgtatgtaaaagaatgatgttggatataatttatagttttttttatattatatttaataattaatttagaatgtattaaataacgaagtttaagagttaaatttgtaaaatttttagaagaaaatattgaggaaagttttgtgaatattggatttggtagtagttttttggttggatgatttaaagtatgagtaattaaagaaaaatgataaattagattttattagatttaaaaatttttttgtaataagtgatattattaaaagagtggaaagaaaatgtatagaatgggaggagttatttgttaattatatatttgatgaagaattaatatttaaaatatataaaaaattataatttatttattaaaaaaataacgttatttaaaaatgggtaatggatatgaagagatatttacgtcgttgtttattatttatataataggtagagtaaattttttaaacgggaattagagtatattattattattatattttaaagttattttagttttttttttttttagtgtaatgaaattttaatgttttattattttttagaagttttttaatatagggtttttttgttaattttgggtttattttattttttttagtttagtttatttgtttttatttatattagttttttgttagtgttttgttttatttttgttatttatttatgttttgatttttatatgtatttgttttttagggatttatatgatttattttttatacgatttaggtttttttttagataattagtggttaagtttttagaaacgttttgtttaatgattttgtttaaattatgtttttgttatttttattattattaattttttggtttaggtatattttttttaatggtaattagtggtaatattaggttttatttgtttattgtttattggtatattagggttttttagagaaatttaattaattggatagatagatagatagattatagagagaaggaaagtattatagttattgaagtaagggtttttatggaagaggtgtgataggaaaggtttgttgttttagggttattatatataggagtgatttttattttgggtaggattttttttttttttgtatttatagtagttttgaaattgtaggatgttgaaatttagtattggttagttatattgtttttttttttattattaaatgttgtgttaaagagtattttaatatattttttttttttttttggagagaggtaaaatgatagtagatatgttgaaatatataaatgtattttaagtacgtgtttttaggaaaagttattagaagattagttgtattaaaatgaggggggatataaaagtgaaaagaaagattgtatatttatatttataatggtgttatttataataggtaagatatggaagtaatttatatgtttattaatagatgaatagattaagaaaatatgattatatatagataatggaatattatttaatatttaaaagaagaaaattttgttatatgttataacgtatatgaattttaaagttattgttaagtgaaatatgttaattaaaaaaaaaaaaaaattttaagtattgtataattttatttatatgaggtgtttaaaatagttaaatttgatgaatgtgaaggtagaatggtggttgttaggtaaaatttttaggtaataaggatttttgtgaaaggggtatagagttttagtttttaaggtgaaatattttaaagatcggttgtattatattgtgtttataattaatattattatagtatagtatattttaatttaattttttttttttggttggagatagggttttattattttttttaagtttgatttgaattgtaggtttttagtgatttttttgttttagttttttaaattgttgggattataggtatgagttattatatttggttaatggtattgtatttttaaaaatagttatgatagtaaattttatgtgtattttttgttataatgaaaaaatgtttagtttttttattaatttagaaagaaattgtattagttaattaaaaatatattaggatgtggtttgtggttttgattatttaggaagatgaggtaggagggttatttgagtttatgaggttgagtttgtagtaagttatgatggtattattgtattttagtttggttgatagagtaaaattttttttttttttttttttttttttatatatatatatatacgaattaggagaattagtattttatgaaattagatagaaaggtttatatgttttagttttgatattttgaattagtttgtattttggttggattttaggtggttttattgtatgtaaagtattgttttagatggcggtggagggagattttaggatagtgattttgttttatagggagaagtttttagtttagatgggagtagcgagaagggtttaggagggatatttttaagaaggtaaagtggaatatttaaagtttgtaattttttaaaagagtaatacggttgggtgtagtggtttatttttgtaattttagtattttgggaagtcgaggcgggtgaattatttgaggttaggagttcgagattagtttgattaatacggagaaattgtttttattaaaaatataaaattagtcgggtgtggtggtgtatgtttgtaattttagttattcgggaggttgaggtaggagaattttttgaatttgggaggtggaggttgtggtgagttaagatagtgttattgtattttagtttgggtaataagagcgagattttattttaaaaaaaaaaaaaaaaggttaggcgcgatgttttacgtttgtaattttagtatttttagaggttgaggtgggtggattacgaggttaagagatcgatattattgtggataatatggtgaaacgtcgtttttattaaaaatataaaaattagttgggtatggtggtgagtgtttgtaattttagttattcgggaagttgaggtaggagaattgtttgaatttgggaggcggaggttgtggtgagttaagatcgtattattgtattttagtttggataatagagtgagattttattttaaaaaaaggagtaatataaatagaagaaatattaacgttaatgagtgttatttataaaataaataaaaataaaggtaagtattaattataggaagaataaatgtttaggaagtgaaaagtggttaagttgatatatgagaaaattagttatggaaaaggaaataaggaacgattgaattaaatataattattatagaaatatatcgggaagatgaaagaatgggaagagtgaaagggaataggtataattaattattgtatttattattgtgttgtgtaatagataatgattgtaacggaaaaattaagtagtattaatgaaggaattgtatttagatatatggaagtaaaagttgaaagatttagttaaaaatgttgaaaatggttgtttttaggaaggtagaaattgagaagatgtagagaggatttatttttttagagaaattttatgtaaatatttgatttttaaaattatggataattaaattttgattataaaaattttaatgaatatgaaaatttatatttaatgagaatagaatttaataagtgatatttgttaattaaaataaataagattaataaatatataatataaatgtatgaatgtgtaaatgatattaatttgaaaatataaaagaaaatgttaacgaatatatttttggattagtaagtagtatatgagtgaattttttattttagtttttttattggttgttttgtgaattaggtagtgggaggaaatagggtttagttagggtttttcgttttttttttgtttttaggtaggttttgtatttatttttgttgtaagaagggtttttatttttgttttgggttttttttataggtgttatttttatattttttgttatgattattttacgtgggtggggttgaggttgttttgattaagaagtgtattatttatttgtgtgttttaatattagtagttaggaggtattaagaaatagggtgaggaataatttattttttgtatgtttatttttttggtttatttattttttatttatttagtttatatttttttagtagttattttacgttagaatttgattgattgggattttttaaaattagaaaatttttaagtattttttattttttttcgaatattatattttagttttgtgttattatatgaaggttttaattttttagggtagatgtttttttatagggttagtttttgaaggttagtgttagatgttttatttttatttttttttagttttttttgttttgttgtgaatttgttagttattaggagttagtagggaaaggggataaggaggggagattgtttttatgtcgtgttaaggtattgagatagatttttttttttttttgaattttatattttattcgtttttagatatatgaaataaaatagattagaagtgtttgtttaaagagtaaatatttatggtataaaattatatatttataatagtagatatagagtaatgcgtaagagtgtgatggggcgaggggattttaaggtgataagaaagttggttttgggttggttaggaggagttatttttaagatatttatttataaagtttatcgatgataatttaattataatatacgtaatatattaaaatattttaaaatataataaaataggttagatatggtggatgatataataaaataaaataaattaaaatgtaataaaataggtcgggtatggtggtttatgtttgtaattttagtattttgggaggttgaggtaggtagattatttgaggttaggagtttgagattagtttggttaatatggtaaaattttgtttttatgaaaaatgtaaaaattagtcgggtatggtggtgtatgtttgtaattttagttattcgggaggttgaggtaagagaagtgtttgaattcgggaggcggaggttgtaacgagttgagattatgttattgaattgtagtttgggtgatagagtgagattttgtttttttttttttttttttttgagatagagtttcgttttgtcgttaggttggagtgtagtggtgtgattttagtttattgtaatttttattttttaggtttaagtgatttttttgttttagtttttgagtagttgggattataggtatacgttattaggtttagttaattttttgtatttttagtagagatagggttttattatgttgattaggatggtttcgattttttgattttgtgattcgttcgtttcggttttttaaagtgttgggattataggcgtgagttatcgtgtttggtttgagattttgttttaaaaaaaaaaaataataatacgaaaataataaaaataatgatattaattaatatggtatagttgtaaatgttttatatttattaatattttgtagtttttaataataataaataagtgtttttattttttttgttttataggttaggaaattgaggtattaagagggaaagtgtttgtgagatttaggtagggaatttaattttagtcgtttggttgtagagtttaggtgtttttagtggagttagtggatttaagagttgatattagaggttgaaattcgagttgtgtggtatttttgtggttattcgttttaattgggtgttgatttaggatttgtaggtttacgagttttggagaaaagagggaaatgggtaaatgttttattgggtgtagtgttgtgtttattttttggggattttttattttttagttgttttaaaattagatttgttttttttttgagggaagatgaggtttttatttttttttttttttttttttgttttttttagtttttgttagtttttttttattattttattaatattagttcgtgttttgtgtttattatttatcgtgtagggagggaaagggttttaagattaaaggataagatttaagagggaatttagtgttttttttttaggtttgattagttttgttatagtgagaggtttttttaaagagaggttttgatttttgtttttagtttttaggttttttttttttgtagaggtatttatatattagggtaggttttgtttattgtgggttttgttttttatttgtagtttagtgtttttttttttttagttttgagtaggtagtttttaattggggattttattaggaagtttggggggtttagtaggtttagtatggaaagacgtggttgttataggatttgtatttgatttgattttgggatttttattttgttcgaggaggtttggttttttttgatttttataatttaagtttgtgatttgtttttgagtaatcgttatttttgtttggttcgtttaattttggaaacgtagttttattttagggttgttgtttggtgaggttgcgaggtttttttgttttgtttttagtagggattttattcggttattgtttttgtaatttataagggattttttttatgtggagtaggggagattttttagtttgaggttgtttttgtttattttttgtatttgggaattgttattgttatagttattatttttatatagaattttttggagagggggttttaaatttgagtttttgttttatttaatatgttttatagtattaggaaattttattaagattgtagagttgaaattatgaaaatttttattggatatcgtaggaattttgagaaatttgtgtttttgttttatataatatgttttataatattagaggaaattttattaagattatagagttgaaattacgaatatttttattggatattaatattgaaagtaggaattttgagaaattggtatatgaattttatattttttttttggttaaaattttagtgatttatgaggaaattatttttgtttatagggaattagaattgataatttttttacgggagacgttataggtgagagtaggagtgattatagatttgtattgtttttgttgtgggtgttttttggatagggtttttttgttgtagggtaggggataaatttttttatttgtttaggtttgaggggtcgattgatagtgtaattaggtttaaggatgagaaattagcgattttattgttagatatatttttttggatattttagttttttattgtcgtttgaattgtttttgtttttgtagaaatataaaattttttgttgtttttttttattttttattaaataatttgattgtaggggaaatgattttgatcgttttttattttaaatttattaggtagtgattatttttagaaagggaaattggtttagggagggtaaggtgaggttatagagtatagattaaatttttaaaaatatgggttttgaggattgtgttttttagggattggagaagaaaatattcggaggtaggatgaaaatagggattatagttgttttgatgaggggttgggttttattttttaaatggtttagggatatttgtttatttatttatttatgttatttgtaagaaatttagggaggttaggtcgtgggaatttggaaagagtagggtttcgaatggtgtagaggatacgataattttaagaaagtttttggaggaggtgtatggggagttgtaaagtggatagagatggttatgtgtgtttaggattttttttgttataaggggtttttaaagggttatataggtagggtttttaggttgggttttataggtttttttttcggtgttcgtttcgatggttggagaaataggggagggggatgtagagaggaagggaataggggtatcgtttttttttagatttttttttagtttttggttttttttagattatagttgtttttattatttgttttttttgaggtcgtgattatttaggtttttagtatttagtacgtgatttttagtttattttatttggatgcgttttagtgagtttaagagatatagagatcgggatggggatagagtaggcgtcgtagttttttttgttgtttattttttatttgtagtaggaggatgttatagttgggcgtttgatttttgtttgggtagtatttatgggtgtagatggagatgttgtttttattttttttttaaattttttaatttttattttttgttacggaagttttgttattaatatgtttatttttgtaggagtaatgaggggattttattgtttagataggggttttattatttttagaaattgttcgttttttttatttggattttttgtagttgatgttttttttttataataacggatatagaaaataataataataaaaatagtagtagttagtagtaatagtagaaatatggaatgtttgttaatgattttgaagtattagtattttttttgaaaaaaagggatttgttatatattgggtagagagttatagttatttttgttgtttttattttggtttgattttttttagggttattttaggtttattagagggtatagggtgagtgttgtgattttcgttgtgttttatgtagtaggtgaatttttgttttttttttcggtaaattttggtggttatttaggtttggtaggttttatttttattaggtaggatatttttttattgttgggtgtcgtggtttaaagatattttattttgacgttaggttagtatgatatttcggggatagaagttggaagttttgtatgttacggtgatgttgttttttgaggtttcgttgcgggtgatatttattatggggggtattggagaagaaagggtagagttagtgaagttttgtttttttttaaggaggggagaggaatagggttgtttttttttattgtttttattttggttgaagtttttcgggatttttgatttgtaagtttgtttttattttggggtttagtttttttaggttggtaggaggatgggttttgggattgtggttttaggttttgggatttttatattgatgttgaggagggggatgttaggggtggatttttgggttgtggggttaggagggaattttttaggatgggtaggttgggaggtagagggggtagttttggttttgaaggtttttttttttgtttgatatttattataggtttaggattttgtcggagggttttttatttgttttgattataatattggatggtttagtttttgattttttgtttttatttagtggttttaataatagaggaaaattaggatacgatgtgttaataggaaatgtttttatttatagtatagggagggtttttttggatatatttgggaggtgaggtaattttagtagaattggagggagaggagagtttttggttagcgtcggtatttgttttttttaggattacgtcggattttagatatcgtcgtagtttttgtaggtagtttgtatgtatagcgtgatagtgtgttttggtttttatggtatttttttttaagaaatttttgacgtttatggttaaggtttgagttttggaggattggggtattgtttattttttagtttttaggttttgggagaggaagagttttttatcgtagtagaaatgttgggagtttttggtgttgttgtttttatggattttatagattttaattttttggagggaatgtaagtttgtttttatttagtagtgatttttttattttcgaatttattatttttttatttaagtgaggaatttagtttagggggtatgtttttttggtttttttttatgtttttttgtgtgggttgagtgtcggtttatttttttgttgagttttattgatttttattttttatttttagtttgagttagatttagtgggaagagataggtttttgttttttgtttttaatttttttggaaaaggtttttttagttatttttgtttttgtcgatttttattttttttttggtttttgatatgagttagggttattttgaggtttttttcgttttttgttaagtttttggtttttttgttttatgttttattttttaggatattttttgtttattgtttttggggttttgttttgtatttttgtttgttatagcgtaggaagggttgattatttagatgtattttagtaagaaattttgattgtatagatttattttaggatagtatcgtgaggttataacgaagattgtggggttttggggaagaggaaattataggtgaaatttttttttggaagtaattttatattgatgtttaatatataggtttgttgttttaatttttttggggtaggaaatgtatacgggtaaagggataagaacgaggattttatatataaagaaaattgtgagggtgggaggatagaggagggggttgatgaatagaagaagggggaatgaagatggtaaatttgtaggttaggtgtaaggattgggtggttataagttttttaagggaataggggttaaggggagaggttgttttgtaggggtaagggaggagtatgaaggtggtggaaggaaggttttgttagaggagatggtgggaatgggaagggatttaggtttagagggatttatgtttagtgtggttgtggtgtataggttgagggtgagatggaggtaaggggagttgtttcgagaagagatttattatgggtatggcggggataagggagggggtggttatgaggtataaagggtaggaaggttgtagttttagagaagtttatagtggggttagtattttagaggggagtaacgaacggtgtgggtttgggtttaaagtggaagagtagtatgataaggttttaggatagtaattggatggaatagttagtgtttattggggtgagtaggtgataaagagttagttgatttttttagtaaatagttttgggggtagggggtgttaaaataaaattggatttttaatttgtattatatataaaaattaatttaaaatgaattaaagatttaaattttatatttaagaattaaaatttaaaaattttttagaagtaaatattggggataatgtttatgatataggatttgatagtgtttttatggatatgatattaaagtatagatagaatagaaagaattgataaagtagattgatgaaaatttaaaatatttatgtattaaagggtataattagagtgaaaaagtaattaatttcgaaatgaaataaatattgtaagttatatatttgataagagaagttatgtgggggaaaaaatgggtaaaagatttaaatggttaattttttaaagaaaattataaatgattaataaatatatgaaaagatgtttaatattagtatttattaggaaaatgtaaatttaaattataatgagatgttatttgaaattaattaggatggttgttattatatatttatatatatatatatatatatatatagagtaaggttggtaaagagatagagaaaatgaagtttttgtgtattgtttttatttttggatatatatttaaaagaaatatttaaaggaaataaatatatatttaaaggaaatgaaatatttgttaatatttaaaaggtagaagtaatttaagtgtttattgtttgagggatggataattaagatgtggtatatatatataatgagtattatttatttttaaaaggaatgaaattttgatttatattataatttggatgaattttaaaaatattattattattattgttttattttttttttttggagatggaattttatttttgttgtttaggttggagtgtagtggtttgattttagtttattgtaatttttatttttcggatttaagcgatttttttgttttagttttttaagtagttgggattataggtattcgttattacgttcggttaatttttattatttttagtagagatggggttttattatgttggttaggttggtttcgaatttcgaaatttaggtgatttatttgttttagttttttaaagtgttggaaatttaggcgtgagttattgtgtttatcgaattttaaaaatattataagtgaaataagttagaaataaaaagataaatattatatgattttgtttaaatgaggtatttagagtggttaaatttatagaaataaaaagtagaatggtggttattaggggttagaggtagggaggaatggggagttatcgattaatgggtatagagttttgggttgtataaaaatgtgaatgtatttaatgttatcgagtatatatttaaaagtggttaaaatagtaaaatttatgtaatgtataatttattataattaaatttttaaagaataatatatgttagttttatttaaattgttttgaaaaatagaggaggagggaatatttttaaatttattttataaagttaggaatattttgatataaaaattaggtaaagatatattataaaaaagaaaattataggtttatatttttgatgaatatcgatgtaaaaatcgttaaggaaatattagtaaattatatttaataatatattaaaaaagattattttttatgagtaagtggaatgtattttaggtatgtaaggatgatttaatatatataaattaattaatgtaatacgttatattaatagaataaaggataaaagttagtattatttaattgatattgaaaaagtatttgataaatttaatatttttttatgataaaaatttttaaaaaattaagtatataaggaatagattttaatataataaaagttatatatgataaatttatagttagtaatatattgaatgggggaaaattgaaagttttttttttaagatttggaataagataaggatgattaattttattatagttatgtaatatagtattgtagattttaattagagtaattagataggagaaagaaagaaagggtattaaaattggaaaagaagaagttaaattatttttgtttgtagattatgtggtttgatatttggaaaaatttaaagattttattaaaaaattattagaattgaagaataaatttagtaaagttgtaggatataaaattaatatgtaaaaattagtgttaatagtaaataatttgaaaaagaaattaagaaacgaattttatttataatagttataaataaaataaaatattgaggaataaatttaattgaagaagtgaaagatttttttaataaaaattataaaatagtgatgtggttgggcgtggtggtttatgtttgtaattttagtattttgggaggtcgaggtaggtggattatttgaggttaggagtttaagattagtttggttaatatagagaaattttatttttaataaaaatagaaaattagttaggtatagtggtatatgtttgtaattttagttatttgggaggttgaggtagaagaatagtttgaatttgggaggcggaggttgcggtgagttaagattatatttttgtattttagtttgggtaataagagtgaaattttattttaaaaattaaaaataaaaaatattgatgtaaaaaattgaaggatataaaaaatggaaaagatagtttacgtttatggattggaagaattagttttgttgaaatatttatattatttaaagtaatttatagatttaatgtaatttttattaaaatattaatgatattttttatagaaataataaaaataattttaaaatgtatatggaattataaaaaaattagaatagataaagttattttgagtaaaatgaataaaattagaggaattatattatttgattttaaattatattatagagttatagtaattaaaatagtatgatattggtataaaaatagatatatagattaatgaaatagaatagagaatttagaaataattttatatatttatagtaaatttatttttaataaaggtattaagaatatatattggtaaaggagagtttttttaaaaatggtgttggggaaattagatatttttatgtagaagaatgaaattagattttgttttttattatatataaaaattaaattaaagtggattaaagatgtaaatttatgattttaaattatgaaattatataagaaaatattggggaaattttttaggatattggattgggtaaagatttttaaagtaatattttataagtataggtaattaaagtaaaattgtataaatgggattatattaagtaaaaaggtttttgtatagtaaaggaaataataaataaaatgaagagattatttaagaatgggagaaaatatttttaaattatttatttgataaaggattagtaattgaaatatataaggagttcgaataattataggaaaaaaaatataataatttaatttaaaaatgagaaaagatttgaatagttattttttaaaagaagatatataaatggtaaataggtatatgaaaaggtgtttaatattattcgttaatagatgaaggtaaattaaaatttttacgagataatattttattttagataaattggtttttatttagaagataggtaataaggaatgttggcgaggatgtagaaataaggaatgttggtgaggatgtatattgttggtgggaacgtaaattagtataattattatgggaaataatgtggaggtttttttaaaaattaaaaatataatagagttgttatatgttttagtatttttattgttaggtatatattttaaagaaaggaaatcggtatattaaagagttatttatttttttatgtttattgtagtattatttaaagtagttaagatttgtaagtaatttaagtgtttattaatagacgtatggataaagaaaatgtggtgtatatgtgtatgtggagaattatttagttatcgtgttatttgtaaagaattggaggttattttgtgaagtgaaataagttttaggtttagatagataaattttgtatgtttttatttatttgtggtagttaaaatttaaaataatggattttatggggagagataatagaatgatgattattagaggttgagaagggtagtggggagtgggggagtagggatggttaataatgggtataaaaatataattagaatgaataagatttagtagatagtatagtagggtgagtatagttaataataatttattgtatatttaaaaataattgaaagagtataatgggattgtttgtagtataaagaaaggataaatgtttgttgtgatataatttatttattttgatgtgattattatatattgtaggtttgtgttaaaatattttatgtattttataaatatatatatatatatttattacgtatttaaataaaagttaaaaattaaaaataaagtaaggagtgggggtgttggttagagagagaaaattaaggtagagggggagatttttagtttgaggaaggatttgttaaaaggagtaatgttggagggggagtagtggtattttaagagtaggtaaaatagattttagatatgcggtgtggggagtgagagtttattggggttaaggaattaaaagaaaagaaggaaggttaaggaatagttggtttaatagtttgttttaggtttgggttggggaggggagatgggtagagtaagaattggagggcggtatgagtatggggtaggagtgattgtgggagaatttggggtagggtgaggataggaggggagggtgttttgggggagggtggggtttgggaaagatgtttagtattgttatatgttttagtatttttatttttttattgaaagatgagaacgtgttgagggtttaaggtagttgggtaagagataggagtagtataaggttttaaggtggagaggggcggagggattagggagggatggtttagtatttgtgggttggagggtggggtttttaagagggtgaggttgaggatgaaggagtggggaaggggttataatgaggtagggtttagaataggtatttgtattggaggggagggggtatttgcgttgttttgcgttttgtttaaggtttaattgttattagtattagggttttttttgggggtttggaggggagtgggatggagggaagattttttcggataaaaggtagtattagaaagttagagttagggatatttgggaacggggaggtataggggtagtattgggtgaaggttgtttgtaggaaaggtttataaggggtgtaggagggatttcggtggcggggataggggatgagggtagaggatattttagaaatggattagagaatagtatataggaaggggtagtagggagttgggagggtaaaaggatttagcgggttttgagatgggtagggaggaggtgagagggaatttggtgtttttagattattggttattagtaggggtgggatgagagagaggagaggattttcggagttagaggcgaggggagaatgagttggggatgagagaagtcgtaggaagaattttttgttcggagtttgtagattttaattttttagtttgagagttaggattttttatagtttttatagtagtaggaagtattagtttcgggtttcgagaaaggagggtttttattttaggagttgcggtttaggagttgagaatacgtcggtttcgggagaggataggattttagggatttgagagtcgtttcgagtatcgggggttgtggttgttttagtggtcgcgttggaagggtattcgaatgttatttataggagtagtttcggaggtagttcgggaatttatgggttttagaaggattggtttgttcgaaaagtgagaggaagcggaggagacgcgaggagagaaagagtaggaggagattagaaagtgtaggtgatgcgcgatttcgaggaggattgaaaagtgacggggaagtagggttgaagtgtggcggtaacgggtcgcgtttagttttttgcgttatcgatagggtataggagtttcgttttgatcgtatagcgttcgtcgttatttattcgattttcggaaacgttttattgttttcgtttcgtcgaggatcgttaggaacgttatttattagtagtagttttcggaggtgtaaaagggaagatgttagttagaagtaggaagatcgggtttagttttatggtttcgacgtcgttatttttttagcggtttaagtagtggtcggggagaaggcgtcgcggaaatttagttatttggttcggtttttcgatcgtttatttaatgaaattggggttcggaatttagggttaattacgagcggagagggcggggttacgtttggaagagaaaattttagtgggttggagatttggggagatttagaaggcgggatttggggtttagaaaatggggagtacgcgggagcgtagtttaaagtagggattagtttcgagtagttgagagtatagttttaattttataagtacggttagggttttgtttgttttttcggtatcgcgattatttattttcgcgtttttatttcgaggagcgcgggttttattaagtttttttcgtcggtcgttttattaaatcggtttttattggtttgttttttttaggatagataacgcgtggttatttttttaatatatttttttaatcgcgtatagcgttattggtaatgagattagtgattagatttgtagatttgtttttagattttagttatttttgttttttagaagtatttgtcgtagtagaatcgtttagattataaatttttttagacgttttagttttataattttttttttttttttttgatttaaagttaggttttttttttatttttttatattttttaagtgtttgaagttttttagggtcgtttttttatttagtttttgggtgattatagggttaaggaggcggttttttgtggtttattataatattaagttttttttagatttttttttttagtttgttttaggatatttgtattttcgattatagttttttttaatgtgagagatttataaagattttttatacgtttgttattatattattttttttttttttttagttttttttaagaatattattatttttggttttttttgattttttttttttttattattttcgggagttaaagttagtttttttaacgttattttaattttatagttataattttagtttaggtttttttttttttttagtttagattattgtatagtttttttaaatacggtgtttgttttagttataattagagtgttttaagttatttatagcgttttatttgttgaatgttatatatgatggatgtttttattttatcgtggaaaattttagttgttataatttgttgtttggtattatttttatttttttggtgatatttttttagggttgtagtaaacgtgggttttgggatttttttattttattttattaggatgttattgtttaagtagttttttttttttaggttattgtaatttttgttttggaatttattagattatattatatttttaaaatttttttaggttggtttgagtgtagtgtttataattaattgattataattagttatagatgtttttgttttttttttatttttattgttttatttgattagtttttaaaataaaaagaaaagaaaaaagaaaaaaaggaaaaaaaattttttagggtagatagtggtgacggtggtataattttgtgattacgttagaagttattgagttgtatattttaaaaggataaattgtgtggtatatgaatttttaatttttaataataagaatgttgtttcgaaagtttttttttattaagagaattgttttgtttttaacgtatattttttagtcgttgggatatttaggtagaggttattaaatttagttattgcgtagaattatttggagagtttttaatatttatgtttttaggttatagttataatttaggttgttaaattagtaaatttaggttggatttaaattttagtattttttaaagttttttaggtgatttcgatgtgtagttaagttttagaattattgatttagttcgtggtttgaatttttttgatagtatttattgtgttttgttatgaattttttttttttttttttaagagaggagttttgttgtgttatttagttggaatgtagtggtatgattatagtttattgtagttttgaatgtttgggtttaagtaatttttttattatagttttttgagtagttgggattataggcgagtgttattatatttagttgttatttattattttttattttatgaattttttaagattaggaaatgtgttcgttttttttttgttagttttataaattttttttttaagtttaattatttttgttattattaattatttttttatgatttttagtttatatttttttgtggatgaaaatgtaatgtattcgagaattttaataattttttagtttttttatttatatttattgataatttattttgatttttataatttattgagtatagtagggatcggggttttttttttattttagagagattatttttattgttaaagattataagtttagtgagagattgggagggagatggatttagtttttttgatataggttttaagtttttatttttacggtgtttattttttttttaggatttttttcgtgtgttagttttagtaaaggatttgatttagttcgtttttaaaaaagatttttaatagtttaataataataatgaatatgtaaggtttgttttaaggtatttagaaatggttttagggagttatgaagttagtttttttttgggttaggggaggtcgagatggttttgagttttaggggatttgttttttagtgtttaggtttgggcgttttttttttattaagttttttaggttttttgtttaaagttttttttttttattttatttttaatttcgtttgttttattttattaattacgtttttttttttagtatttgttttatattttatgtatttacgagtatagaggcgattttttttttttagattttaggcgttattgtagggttcggaaaagaaagagaaacggtttagcgcggtcgtttatataatttagggcggggtttcgtttcgttttcgaaagtttttgcgacggagtttttttttttgttgtttaggttgaagtgtaatggcgcgatttcggtttatcgtaattttcgtttttaaggtttaagcgatttttttgttttagtttttcgattagttgggattataggtatttattattaagttcgtttaattttatatttttagtagagacgggatttttttatgttggttaggttggtttcgagttttcgattttaggtgatcgttcgtttcgattttttaaagtgttgggattataggcgtgaattatcgtgttcggttttggtcgtatgtgttttgaattttgttgttcggaatttattgcgaggattgggattattcgttatttcgttttggtttacggaaaatgaaatgtgtttattgatatagaaacggaataacggcgttgtgggttggggagggtcgagttgtttttaggtttttggtttttagttgtagggtatttatatttgttcgttatgaaaatgtagattcgtagggtaggaatttcgagttcgggttggagcgcgatttggaattcggtttttttgaaatagtatcgcggaggattcggattcgggtgagtaggaaattgcgttttagttttttttacgggtcgtttacgtattttaggattcgaaaacgttttttgttgtttcgttattttaggaaggtagcgttcgtttttgggcggttttgatggaaatcggttgcgtcgttcgtaggaaaatttataattaaggggttaggaaaaagttttttagggtttcgttattttagtgaggattttaatttatatttttagtttggtttttatgaaagattggagtgatttttattgaaatgatataaggggtttagggagttgcggcgtttagaatgcggtgatagcgtcgtttcgcgttttttttttgatttgttttcggcggacgcggagaagtttgttggtttggaggttggaatatatcggggattaaatgtagagaatggagaaaagagggaaggatggggggacgtgttgaagaaatgagggaagagataggaagaaaaggggagagaaaaagtaaaggagagttttttttttttttttttttttttttgagacggagttttgttttgtcgtttaggttggagtgtagtggcgcgattttggtttattgtaagtttcgtttttcgggtttagggtattttgttgttttagtttttggagtagttgggattataggtttttgttattacgttcgattaattttttgtatttttagtagagacggggttttattgtgttagttaggatggtttcgattttttgatttcgtgatttgtttgtttcggttttttaaagtgttgggattataggcgtgagttatcgtattcggtcggagagagaaaatttaaaagacgtagttttattattttttttatttttgttttttatttagttttatttatgaatatttttattataaatttttttttttttaaatttgtaaatatgttgttattattgttattttagagtttgtgagggtaagttgtagatagtatgattttttatttttagatgtgttagggtgtgttttttgggtataagaatagggtttttgttttgttttgttttatataagtaaagtataagttttaaagaggataatatttttaaattattttattgggatatattttgtatgtaataaattgtatttatttaaaatgtttaatttgttgaattttagttgttgtatatatttatatttttattattatagtgaagataaagaagattttaatcgttttttaaagaatagttatacgataaaattttatgttgttattaaaaagagtaagagtaattttaagtattgttatgaaaagatgtgtttagtatatttttaattttttttaaaaggttaaggaggttgggtatagtggtttatgtttgtaattttagaattttgggaggttatggtaggtagataatttgaggttagaagtttaagattagtttggttaatatggtgaaattttgtttttattgaaaatgtaaaaattagtcgggcgtggtggtgggtgtttgtagttttagttgtttgggaggttgaggtaggagaatcgtttgaatttgggaggtagaggttagagtgagtcgagattatgttattgtattttagtttgggcgaaaatgttattaatattatttatataatattaatatatatttgaagtaggggaaaatttggaagattttttattaaagttttgatagtgattttagagattgggataattttgtgatttttatttttttttaaatgttgtgttagggtttgatcggtagatttaggttgtacgatggatgaataatgtatttagatatcgatatttagtgaaagagtgtattagagggttaggttatttatagaaagggttgtggtagttgcgtgttttgattatttggttttgtgggtttttatttagtatagatttaatgataaaggttttgagttaatatatttgtgggtaattaatttggtcgtagtttttcggagagagtagttttataaatgattaaaggtaaatatgttttttagataaatttttttatatgtttttgtatttattcgaagttattaatttaaggtaaggggattaggttgtttttagttataattttattttgaggtttttgtaaaattttttattttttaagaaggtttgtgtttattttttataattttatttttataattatttttattatttgattaattttttataatgttggaattttattttttagtgtaaatttggatttgggtggattgtagtggtttatgattataattttagttttttgggaatcgaaggtaggaagattgtttaagtttaggagttttaggttgtagtgagttatgattgtgttattgtattttagtttgagtgataggaggagattttgtttttaaaatagaaaaataaataaaattttaaaataataaaaattataaatttggatttatgtggaggttaaggaagagaatattttagtttgaaaatatgaagttaagttttataacgaaatagttatagagttttaaaaaagaaaatgtttattaaaatttattattagaaatttttttttaagaggattttttatatttttatggtattgaattttttttaaagtgtatttgaaagagatgtttttagtggaatagagagatgtgtaataatatttataaaagcggttggttgtaataaaaaggaaaacgtaaatgagtggggatataggggattttgttttatttatttttaaagtacgtttgaaaattgcgttgttatagcgtttttgggtagaggtaaagtcgaggtagattttgtttttggagtattgatttgattttggaaacggtttaaggtttttagaaattaggttgatttttagatttaaagttttaagaatattcgttttagtagtgagtttgtgagaatttagtttatttgggcgatgtacgttttgtttttatttagtggtagtgattggaaggatagggtatagtgttattgtatgggtggggttgaagttaaggtgaaatcgtttttgtaaaattataattaaggaaatgatgatagtgaaagatattaaatttaattgattttattttgtttttaatcgttaaattgtttttttttatttttaggtgtaggttgaattagttttgggaaggaatttagtttatagtttaaagggaaattgtttttgtaaaacgaagaaaggttatcggttattaagttaggatgagaggggttggaattttgaatattattagttattattttagaggttataagatttgtaatttttttagttatttttgaaggtaatattattattgtgaattttagagtggttttttgagatgtttttttaggtttttgtatttttaatagttggagggttttatttggatttgttaattagttttgtggtttttacgtttaggaattgatttagtttaagagaatggtttttatttattatgattttatatcggagttaattagttagtattttcgatttattggtttttttatttattaaattatttttaaaaattgatgagagtttttggggagattgatttgagtaataaaattttggtttttcgtatagttggttttgtatgaattattttttttttgttgtaatttttttgttttgataaatcggtttcgtttaggtagtcggtaagatgaatttatttggtggttataaagggagtttaggttagtgtgtattattgtagtggggtttaggtagcggaggaaaggcgaggatatttagggaataaatggtagaggaagaaggagtataagggaggatttaaattttttagatttttttttttttttttttttgttagggttggagggaattagcgtggttttaggaggggtggttggtggggtgtagaaaacgttttggttgtaaaggggttttacgtgttcgatataagggttttggttgttagttgttatttatgagtttaaattaggaggaggtttatacgtgttttttgtaaagtagattttttattttttatttcggttggttttttaaatttattttgataaagtagaaaaattaagagttaaattttgcgggtgatttttttgatagttggaaggttttttttatttttattttttgcgtgttttttttttgttttgttttttttgttttgtttttatttttttatttttttttttttttggattttgtttttgagtattttttattttttttagataatttttttttatgaagtatagagttttttatttttaggaaaaagagataaagattacgagaaggatttgagaaacgtttgtgatttcgtttttgagtttagttttttttttagcgttggttttggttgtgtgtgtgtgtatgtatttttgttttgtttgtttttgagatagggttttattttgatagtttgtagtgttttgattatagtttattgtaggttttaatttttggatttaggtaatttttttattttagtttttcgagtagttgggattatagattggagttattatatttagtgtgtgtgtgtgtgtgtgtgtgtgtgtgtgtgtgtgtgtgtgtgtttgtgtatatatatattttttttttttttttttttttttgtagagattgggttttgttttgttatttatgttggttttgaatttttggttttaaataatttttatgttttagttttttaaagtgttgagattataggtataaattataatgtttggtttttgtgtgtgtatatataaagttaaagtgttaaatttggcgtttaggaaatatttttatttaggtattgtttgtaatagtaggtattttgtgtatttgtgtttttattttaggagttgggatagttatatttattagaatagtacggtgttaaggtttttatttttagaaagtttaggagatattgttttatggaggagagtgagattggaggaatttttgattttaggttttttgattttttttatataaagcgaagttgaaaaaaagtgtaggatattttatttttttttgggattagatagggaagttagagttattatggatgttaaatttcggtaaggaaatattagtatagtaaaatttttatattatattttaaagtttatataatggtttaaagagaatttatattaaaaaatcgaatttttagtttaggtgagattattaaagttgtttgtgaggtttcgtggaatttgtaggtagaaaggatatttttatttcgagttgtagtttagttgtttttgcgttttggagttttttgaaaggattttttttttttaatagtatatagggaggttatttttggggagaaatgtagattgtttttagatttttgaggtttttatatttgtttgttgattttgtggattttgattttattattaaatattttataatgatgtaatttgttttgattgtaagtgtagaataggacgttgtttttgaattaggaaataagggattggtgatttgaattgttattattttttttggtgtttagatgtaatgaaatcgtgaggtaataaatttatggttaggtaaagggttaattttattttagtaaatgttttagatgtttttttttgtttagtaatgttttagttttattttagttttaattttttaaaatgtatattttttttagcgttgattttaaagtaattcgtatgtatttattatattgggtttgttgtagtaagttatttcgaatgttgttgtagaattaaagtaagtaaataaatgtgtggttttttaaggagttattgttaatattattttaaaaatgtattaattttaaatttaattattttttatttttttattgttttttttttagggttattttttttaagatagtaaattagaaggttttttagttgggttgtttgttgatttttatattcgttgtttattatttatataatagttagagtgagtattttaaatgggaattagagtttattttcgttttcgcgttttatagatatgttagttttttttttttttagtatagtgaaattttagttttttattatgttttatagttttttattttttattataggatttttttggttattttggtttattttatttttttgggtttagtttatttatttttattaatattgtttaattttgttttaggtattttttattggaattttttaagtgtatttgttttttagggatttaaagggatttaaaggttttttatattatttaggtttttgtttagacgtttagtgtttaaatttttaggaatattttgattaatagattatattttttattatttttattattattaattttttagtttaagtatattttttttataataattattatcggtattagaattgtttttatttgttttattggttgttatgtttttcgaggtagggattttgtttagttattatttggatttttagtatttagaaatttaaggatagagaaggggtttaataaatatgggttgagtaaatgggtgaatataattggtatattgtttttttttttttttttttttttttttttgagatagagtttttttttgttatttaggttggagtgtagtggtatgatttcggtttattgtaagttttgttttttgggtttatattatttttttgttttagtttttagagtagttgggattataggcgttcgttattacgtttggttaattttttgtatttttagtagagatggggttttattgtgttagttagaatggtttggattttttgatttcgtgatttgttcgtttgggttttttaaagtgttgggattataggcgtgagtttttgcgtttagtcggtatattgtttttgagaagtaatttgataatatgtatgagaaggtttaaaaatgtttatgcggtcgggtatgatggtttacgtttgtaattttagtattttgggaggtcgaggcgggtggattatgaggttaggagttcgagattagtatggttaatatggtgaaattttgtttttattaaaaatataaaaagtagttaggtgtggtgacgtgtgtttgtaattttagttatttaggaggttgaggtaggagaattttttgaatttaggaggtggaggttgtagtgagttgagatttcgttattgtattttattttgtgtgataaagcgagattttattttaaaaaaaaaaaaaaattttatgttttttgatttagtaatttttattgagaaatttgtgattttaaaataaaatttaatatatagaaagatttttaggtataaggatattaattataataatgaaaaaaatatgtaaaagaagagtggttaggttttttgtttggaaatagtttatagttggtgaaagttgtgtgtaagaagattttgtaatatgatagaaagttgtgtattgataataaagttttgaaaagtaagatttaaaataatttataagtatgacgatattaagttattttgtatagttattcgtatgtataaaaattaggagtggaaatttaggggtagttgtaaagtatagttttaggttttttttttttgaagtttgaggttttgttaggtaacgttttatttcgatttttttagtggagatattggtagtttttatttttttgtttttttatatttttttatattttttgtatttgagattttattttttaagaagataaaatatttattagaaagttttaaaaatttgaaataaaattttaaagaagtttaaatgtttggttaggcgtattggtttatgtttgtaatttttgtattttgggaggtcgaggcgggtagattacgaggtgaggagttcgagattagtttggttaatatagcgaaattttgtttttattaaaaatataaaaaattagttggatgtggtggtgggtgtttgtaattttagttatttaggagattgaggtaggagaatcgttggaattcgagacgtagagtttgtagtgagttaaaatcgtgttattatattttagtttgggtgataagagtaaaattttgttttaaaaaaaaaaaaaaaaaaaaagtttaaatgtttatttttaatttagttttaaggaaagttttttttagattttatagggtagaaatttttgttgatggtatttttagaaggtaagaaaggaattcgttttttattatgtttgattcgtttttgggttttaggtattggtcgattgataaaggtaatattgagagtgtgattaatgtgtagacgatcgattgttatataatatgaattttattatatttgagagagtgggatagatttttttatttttatagtttgggtatttgagtttttgagagtttgaatgtttgatatggattttttaagaatgttggtttttagattttaaagggtttcgggttttttgtgaagttttttgtgtatgtattatattcgtagaggttttataatagcgggaagggtatttagggttagagtttaggcgagtttatattcggggattatttatatttagggcgtgtaggggaggggtcgaggtgagagtttaatttttgtttaggttgtggtgattggtggttgtacgggggttttagcgtttttggagttattattttttattttttgaagatttcggattcgtatatattaaaattttgtatttttggtggagcggtttttttttttgagatgtaaatattatttttcgaattttaaagttagttattgttatttttaagggataagtttttaattttattgaaattagttttagaattttagttgagtatttggagttataggtaggaagtttgtgggatttgtatttggttgatttggaaggtggttttgaaaggtagtgtgtgattaggggggttttgaggggtatggatgtttttgatgaaaggagaataagatagatgggaaggttttaaaagtgaattttagggggttttgtgtttattattaggatttggaaaatttttttttagttatttttggtttgtgggtttttattttgtttttttgtttgttaagttattttaggtaatttttttatttggtaaatatttattaaatatttattgtgtgtagggcgttgttttaagaggagttgggattgagataagaggaaataaattttttttgtttttaaggcgtgtttagttttgtttaggtagagattagtaaggaaattataatataaattgagagaggaaaaaggaagaaattggttaggcgggtagttatggtgggtttttagttgaattattttaaataaaagaatagtttgtaggtataaagaagggaatttgtataggggggtttgtttaagatatgtttatagttgtataaataagaaaggttgtataggagatttgtttagatatgttcgtaatggaaaattttgtttttcgatacgtgggtagttagggaaataaagtaatatagagtaatttaagttaagggtttgtatgggtattaggaggatggggtggagttatcggaaatttatgttttatgtaaatgagatatttagtttttattagttttttataaaagtttttgtatttagttgtaaaaatggtaattattttttaagtttttttttcgtgggggagagttttttttttttgtttattaaatttttgttttaattttattttttgtatttatgttttttaatttttttggtggtgagataaagaattttaggtaatattttataaggagagattgagaggttgttacgttgtggtgtattggtaagattaataaattggttagtgggatatgtatatttgtttggtagatatatatgtagatttttagttttgattaatgaaggaatattaaaaattttataaaagaaaataatattatttgagttttgttttgtggtgtaagtgggagttttataggtatttaggataggagagttttgtttagaatttaggaagtgaatatttttttttgggttaggttaagaatgagattaagttgattgaggagtttggtgttttttggtaagaaagggtgtttgatatttgattatttagaagttatagttatttaatattgagatttgaaatagagagagagatagagagagagagagagatagagagagagagagagatagagagagagagagagatagagagagagagagagagagagagagagagatttgatttgaaaagtagaattttgttgggggtttgttaaatgtagagtttttgatatagtaggtttaggttaggttttgaagattgtatatttaagtttttaggtgatgttaatgttgttttttttaggattatattttgagaattattattttaaggtaatttgtgttggtttttaatattagaagagggttgggagtgggttgggaggtagaggtgtaggattagtgagattatatttgatttattttggatagttttttattttatttttgtagtattttattttttgggagttttgggaatggaagatatttaggaagggattaaatgtggggttatagggtgatttagaggttcggttttatatagtatttggggttttcgttattttataattggtttttatatttttagtttttttattttttacgatattgatttttagatttttttcgattaattttagtaggttgggtttgggatgtgatattaggagttttgagtgtattttttgatttaaagatagggtgatcgcgtatgataagtatttagatgggttattaataggattttgaatatttggtaaatggttttagttacgtgtgtttgagaattttagtgttttttagatatggtatttatgagtttatataaatattggagggcgtcgtgagtatattgaaatttataattgttgtattggattttttagaaatttttttttatttagattaagatttgaataaaattttttttattaaataaattgtatttaattaattatgttgttattttattttgtaatggaaaaaagatagatgtaaagaaagattatgtaattaaaaagaaaataatgtattgaattaaaatggcggtaaatttttttgttaaaggaataatataatatttagaaaatttttaaattttatttcgataaaggttaaaaaattttattagtttttaaaaagttttttattttgaattttttgggggtttgtttggtttttttaggaattattttttattttttgatatagtttaaaatttaaaatttaaaatgtttaaaaggtaaaatgttttttttttattttgttttatttttaataggtaattaaggatattaattttttgtttatttttttaaatatattttatgtatatgtaagtaaatataaatgtgtatatatatattttttgtttttttttatataaattttagtagattttatatgttattttatattttgttttatttttttatgagggaatattaagagttttttatgtttttttttttttgtgttaaatgtttgtagattttgtcgtgtagttatgtagtgtttgtttgggtttttttaagaagggaggtttttttatgttatttagagtggagtagagtgtatttataggtgaatgttattgtgtttagtttgtaatgtttttttaattagttttttagtgatagatatttggattatttttttttttatttgttattttttttttttttttttttttgtttttataaatagggttgtaatatataattttgaatatagttattttttaggaatgtaggtgtgttttggatatatttttagaagtgggattattgggtgtatgtatttttaatttggatagaaatagttatattgttttttttgaaaatatttttagtttgtaggtttatttgtagtatattagagtatttgttttggtattattatttttttgattatagaaatatgtagagatatatatttgggagttatttgtgtttagatgatatttaaaattttgagagtggaggatatcggagtgattaggaaggtagtaatattttagagtgttttagtatttatagtaaaaggagttaatgaagggggattgaggaggagtagttagttggggaggaagagaatttgatttgtaaaatgttaaagaagattttaaaggggggagttgatataatttttttagagaataatttgatattttataatattatatggtaaaagtatagtaattttatttttatatttatattttggggaatttatataggggattagagagagatgatttaggatgtttattgtggtagtgtttgtaatagaaataagttaaaggttacggatagaagagataaattgtgggatattttttttatgaatattatttagaattgaaaataaagtaattgtttttatgggtgtgggtttattttataaattatattaaatgataaagtaagttatagaatgatatatttaataaaaaataatttatacgaagtttaaaattatgtaaaataaagggattttaaaaattttgtaatagtataaaggtatttattaaatttaagatattcgttattttttattggtagtttttgttttatttagtatagtatcgattgaaatatatatataatagaattgtggaaaattagggttatttgtatatatttttattattttttatgtatattatatatagttaataatattaaaatgttataaattgataaatttgagtggtggttttataaagattttttttaattttttatttttttagttagaattattttagttagattaagtggtggtagtgatttgtaaaagttagaggttatagttattatgataattttaatagagtaggtaaggttgtgtttgatttgtagggagtgtggggaaggttaatagagggtagtgttttaggtttagaatagaaggatagttagtaagggcgttgtttgatatttatgaaaagaaagtaagaattgaggagtaggaggttgagggtgtttgatttaagataaagttataatttgtttttaatgtttagattttatttaatttttagatttagattttaatgatagaggaggggagtttatatttttaggaggaagaattttggaatattttgggagtatatgttgggttaattttttgaatttttttgtaaaggaatttatagttatttatataggagattgtatatcgggaaagggaaataggtagaatttgggtgagtattgattttgtgtgtgaattaatattgatgtttagatttttatagtattatcgtgttttattatagaggggtttttagaggttaggatatattatagtttataatttcgtagttttagttttgtttagttttttattttttgagtgtataatggtattgatgtattggtagttggagtgatttttatatcgcgtttttaatttgtggattaatggtttttattgcgttgaaggttaaagggaaatttttgaaattgtttttattttaatcgaagcgatattacgttttagggtaggttttggaggttattgtaggtattgtggggggtagtattattattagagagttgtaggaggtgggatagtgttggagttgtttattattttcgtgtattttgtttttgtagaagtttaataggatttaaagaatgaataggattattttagatttgattaagtagtggttttgattgtagttgttatgttggttggatattattgttagtagaagttaatgaggttgtaggttaatggtgtgtagtcgaggatttgttgagtgtatttttttttagttagaaagtggatatggagttatttatatttatattatatttatttatattttttttgagagttattataatttttttgttatttgtaatatagttttaagagatgtcggatattttatagaatattaaatttgtttattttattggtaatattatagattgggatggatgagaaagaaggtggaaagtatgttggaggttttggtaaaatatatgtattttagaaagaggaggataaattttatagaaatttaggagtggtaattgtagtgaaattttatgggtttagtggttaggtgtatgtagagatattttttttaagtaaaaataaaagaaaatagaaaaaaaaattcgttgtattttttatttttagtgagaaaaaaaaaaaaaagagagagaagcggattgtttggtgaatttttttgggttttgataatattatattttatatttaggtatattattttggttatattttgggtgatataggaggatgttagatttaagtggagtttatataggaaaggattttgtagtagatttaggttgtggtgtaggtagttattattttttagattttttggtgttggaggtggtagggttgggtaaagatgtaggatggagtgaattgagtattagtggggaaagttataatggagggtttgggattttggagtaagtttatgttatttatagtagaaatatatgtttttttttcgaagtaatttttagtgttgttggttttgattagatagaatttttgattataggatattgagaattacgtaattttaagtggttgtatgaattggtttttgtgtgatttatagagttatagattggataggtttaatagtgtttattatgagacggaaatggtttatgtggaatgagtttaaattttaagttaatattttatttgtttagaaaatatttgtttttgaggtggtattgaataattaagtagataaatggaagttagttagtttttattgggggttattttaggttttgtagggtgggaatatgtatgtaggaattataatagttttttttatgtgtttatttttttaggttatttagtggttttggtcggtgggagttagtgttgttggatttataggtagtttttaaaaggtgagatttttatttattaaggtcgaattagttgttgttatttttgaatatttaatttgttaggattagatattcgtgataggttttgatgtgttttgtttaggtattatttttttaggtgattaaagtgttattaaatgatatattgattatattaagttttattatggaagggttagagatttatttttattgggatagaaattttttttatgggtaggtttttttttttattatttttagatttttagttagtattattgatatttttgatttataggtttggaattatttttagtatagtttttttttgggggatttattttatagggaaatggaagtgggtgtagtatggattatgattaggggatttattgattttattattatttgtattttgcgggggttgtcggttatatagaatattggataggtttttaataggtataatttagaattagtttggaggaaatattgaggaatgggtgttattttttagggtacggtgtatttattgaattagagatattattacggtgttgtatttttagtaggaagaaatttgggtttagaaattaagggatggaagagagtgtggttgtatgttttattttttatatttatttattgtggaatttggattttttatattttaaatttgggttttgtagtataggaggttttggttttttatagggaggtatttagataaggggataaataagagtttattgagttatatattatagttgttcgtaggatagtatgggtttagagataagtagggaagaagagtattttttttttttttaggtaggagtgatggatttttatttttaggacgaggtagggttgttgatatacggtaagggtaggaggagtttgtgtggaatttagagatttatttggggatttttttgttttttttgttttattgtaaatgtgaatagaatcgtttagtaatttagtttgatagcgtttgatttttaaaggtttagattttttaggaggaagatttgagtcgtatttttaggaaattttttaaggtttttttttcgtgttttgttatttttagtagtattggtgtagaggttttgttttttatgggttgtttttagttattgatacgtaatagtaggggtattaagatagattatttttgggtaataggagatttttttgttggttatttgtggttggaggatttttttatggttttgtttaattttttttagattgtttgtggtttaggatgcgtttaataatttttttttttttttgtttaggattggagttagttttgtttttgggtttgttattttttttagggttatttggttttttttttatattttttgataggtgtgttttttaataaattttgtgagaggttttgagttagaagtatttaaggaaattttttttagatttttgattattggaaattgtgggagatgataagaatttgttgttttgggttgttaaattttatgttatttattatataataatagataatagcgttttaaaagagagaatgaattattatattttaatttttatttattttaaattaattaaaagatatttagtgttatttggttttaagattttagtatttttatgtattaataggatgtattttattaatatttataataatttatttatttgaattttagttttttattgtgatttaattaaatagaaaaggaagattttggttatgcgaggatgatttagtgatggtttttatataattatttttggtgatttattttttttagttatttaattaatattattgtaggtgtcgttgtgaagggattttgtagatataagtaaggttttaaattagttgattttaaggttatgattattttgttttggattgttttaattaggtgagtttttaaaataatttattttttttttagtaaagagatttatagtgtgagcgagatttaacgtgaggggtttttttcgttgtgagttttgaaaatgaaggggttatgtggtaaaggatatggcgggttttaggaattgagagtagttttattttatttttatttgatagttgtttaggaataaggattataattttataattgtttgaaattgaattttgttattaagttttgtataagtttgaaggaggattttagttttaagatgaggatatagtttcgtgaaattttgaattgagaattatttatattaggtttggattttttattaaggaaatgtagagaaataaatgggtgttgtgtagagttagtgagttagtggtaatatgttatgtagtaatagaaaatttatatataggttaatagataagtatataatattttttttattggaataaattagtgaattgaaatgtatattttttgtataagataaaattttttttaattttttggtattttttattttataatttttatgtaatgtaattatattttaatataattatatttatgaatttattaaagattaaagttaattttgtatttattatgtattaagtatgtttttatatatcgtgtagttggtttagtttttatatttgttttttttatgttttttgttttgggtttgtcgttatagttttggaaatttttttggggtttaagattagggggtttttttaggattttatggttttgttttttttttagttttttataggatgatttttttttagaggtagagaaggaggtgtttaggttgtgtgtaattatgggagacggatgtggaggagtttatttatgttataatttttttttttttatattttttgtaggttttgattaggttttgtttttgttttattttaggtagtgatagtgattagggttgtgatgtgttttttatagtttgtaaaggtggcgttttggagggttttatgtggaagggggatggggtataggggataagattggattacggtgattttttgggatattttgagtgtgtagtggggagtttagagtgttacgttttatggttattgatttgaatttgtttatgattattgttttttgtagtttgaggtagttgttttgtgagggattgagatgtagtatttttttatgttttttttttgtgattttaagagtttttggtgtttttttttgtaaaggtatttgaatgtgtttgcgtttttgttagtttaatgtgagaaggtggagagattagtttttttttatgtttattatgatttttttttttatgttgaattagttgattttataaaaagaaaattattattaataatgtggatgggttttattcgattagtagaagattttgagagtagaaattgaggttttttagagaagaagaaattttgttttagaattagaatattttttttttgcgtttttagtttgttagtttattttgtagatttttatatttatcgttttaataattatatgaataaatattataatatgaatataaatatatatatatatatatatatatatatatatatatatatatatatattttattgattttgtttttttgaagaatttggattgatagagattgtggtacgaagagtggttttagaggaatagaatttttttaaaaattttatagttaattataaaaaatattttattaaaatgttgaaatgtatataagtataattataaattagtaattaagaatttaattggtaaagaagagaagaattgttttttttttttaatatagtataagtaatagtaatttggattttttttatttttagttattatttgttttaggtgttttttatttaagtttttggtttgtgttttggagtgaaaatttatatggatattaagaagtaattttaataatgtgaattaggtattaaaaattttttatggtatgttaatatgtaatgatggtttatatatattttaatattttataataggtaagtattatttttagaagaaaattaagttatttttgtagttgttagtgaatgttttataaatgaatattgaagatttaaggtattgttttgttttggagtggtgtttttgtggttttagtaaattgtataaaggttttttttaataatatatattattttatatatataaatattatatatatatatattttttgaaattaaaagttgaaaaaagaaaaaatataaatgtattttttgtgatagtttaattattttattttatcgatgatttttttgggtatagaattgaaattattagttaatgatgtgtgtttatatattttgttgtgatttagtggttatgagtaaatggttttttattttttattgttattataatatggttatttgttttcgatttaataattttttttttagttttattttttggtttttgagattaatagtttaagtggtattttgggttattgagtggttagataggataaggttgatttgagttaatatttttggtatgtttattttgatttgtaatagaagttttttttggatttattttttataaggtgagatggaaaattataattattatttacgtttgaaaatatgggaggtagttagtgtttttttttatggttaaatatttgtttttaatttttattattgttttgtttttttaaattaattagtagtagtagttgaaaagagagagatattgaagaagaattttgtaggtataaagaaaaggaaaagtatgtggagttttgttgtgtatttgttagtttattttattttattagaatttggtatttttaggatttgatgttttgtaggtttttagttgagggtagcgagtattttgagagttagttggattttttttttggagtgtaattgtatagtaatagtatttgtatatggagttgttttgcgtttttggaatcgtttttgttggttatgggggttattgtgatattgtttttttttttgttattttttttttttttgttttgttgttagggataattttgtttttgttggtattatgttttgaagagttgaggatgatatattttggttggcgttttttttggtcggttttgggttattgtttaagtgttaagtgttgtttgtggtaggaggttgtgggaatgagcggtatcgttttacggagttgtttttgtgggagtggtttgtaggtgtttgtatttgtggtatttttataattttttttaagatttaagaatgtgttgtgggaggagagtaggtttgggtttttttttgtgttttttatttatttatttgggtggttgtgggattgacgttgtcggaaatgagaaacgttgtttttttataaggtattatttagttttttttttttggaaggtggtagtataatgtttaggttgagatggatataggcgttagtattttaaagtaaaatatgtgattttaatagaaatattcgagttttttaatgtgaatgaataggattttttattttttggtaattatgtatttttttttgagatttgataaaaaaaaaaaaaaagaaagaaagaaagaaaaagaaagaaagaaataataatggggaaaaaaaaaagtagaagaaggtgtggtggttggggtgtggggagttgggattttggttttgtgtaggtgagttgttaggtgtttttggggaggttattattattttgggttttgttaggttgaggtattatagagttagtttttttgacgatgtcgtttgttttagtggtttatcggaagttattgcgtttagattagttttgtgttgatagaaatttttaaagtattatgttatataattttatgttttttgaggaggtaaataagtttttttggttaagttgttttttatggtaatttttttgatgtgtttgaagatagttagatttgtggggtttttatcgttagtgaatatttgtgtttttttgcggggtttatttttaggggtttttgtttgttggttgtttttatgattgttgattttacgttttttggtggaagttatgtttttttttgttttttgagggttggaaaattggaaaattatggtcgatgaggatagatagtaatatttgttttgtgtggtattgttattatcgtatttgaaggtgaagttatgttttagaaagtataaaacgtggttttattttttggttgttaagtggtttagtggtaatgtgagttcgagtggacgatattgtgatataggatagggtggatttaagggtttttttttagtttagggattaattgtagggttgggggtaatcggggttgagaggaatttggagacgcgttggtgtgtggtcgggtgagagtttggagagagtttttatttgtttttatagtatttgggggagatatattgaggaggggggtatttgtttttttattttgttttattattgttttttattttattggtatttttggtgtttattaggtattttttacgtgttttttttttaatttttagaattttttcgtgaggttagtgttgggtttgaatttttggagttgagggaagattttgagttcgggagattttttagggaggggtttatattttataattgacgttatagttgagttttagtagttcggatttcggattttagagtgttttgagttttgagttgttttgggttggtagtgttttgtgttagttgtattgaggtagtcgtgtttttgttggttttataggtttttttatttgaaattagaagtagattaggattttttaaattttttttagttttgatgggtgatatttttattgttttaatgaggtaataattgtagttattatttttgtggtgggtgttgttatgttttaggtatttttttgggtatttggtatatgtaaatatacgtatttataatggaagttcgtgaagtatagagaggttaagtgatttggttaaggttatatagtagtaagtaatggagttggaatttgagttgagataatttgttggtattatgttagatatagtgagatgattggaggtgggaagaagttggggtgtgttgattatatagagtatatatggtttttgtagtaagttggagtttttggttatttaaaggtggatttgtgtatgagtcgaggataggtttttaatgtgttagatgaggtgagtaggagattatgtatttgtgtttttagttttgttttttacgtttttgttattttttgaggatggagtatttgttatgtgtatattgagtggtatcgtttatgttgggtgagtcgttgtagttgtaggtttttaggttttcgtgagaggtagttagtatttgtagttgttggggttttattaggatgtattttgaggatattagttttgtattatttttgatttagatagtgggttttatgggattatttttaggtagggagtaatttagttttgcggtgtttcggaggttaaagaataattgtttttgatggttttaagattttagcgggaggttgtagtaggttttgagtgagggaggattagtttttagagtttgggttttgttagataatatttaaattaggggttggtaaataatttttaaaaggatttgaggtaatatttttaattttgttaattagtttttatattaaagatttaattttgtttttgtagtatgaagtagttttttatagatattttgatggttttttttaggtaggttgtttttagttttaggggattagaagtagcggttgaatagttatagttatataaagtattagggtataggttagggtgtttgtggtaggggttggggttgtagtttgttaggtagtatgtagaggtatgttgttttttatagtttagtttggtattagtaggaggagagtgttttttagaagtttaggggttattggagttcgatttagtgtgtgtaattttcgaataggtttggtgtttataaatttagtattattttgggttgttgatttattagtgtatagtgtattttagttgagttagttgtttttggtttattaagttttagattatgtttagtttagtttattggggtatagggatattggaatagaattttaagaatgaatgtattgaatttggtggtggtggggggttttttgaattgtttttttaatttatttggatttaaaggtataaatgattttatttttattagtatagagagtgtgaatatttagaatattattattggatagatttaattaaatatttataagatttgggtgattatgtatttgagattttagaagattttgttaaattagttattgtaaggtgattagttaatttttgttaattgtgttggataaaatggggaaagaaaaagatgaatttagggttgtaaatttttagtttatgagttatataaattatttaaaagtttttatgttttttttgaatgaaattttaattttttgtagttgtagggttgaaatttttgaaaaataaacgtagcgttttattttgtgcgtagttaaattataatataaaataaattttaaatttaaagaatatttgttatttaagtgaaggtattgattgggaataaacgcgatattgaaaattagaatggggatatttgggtagattttgatgaagttaaagatattgaatttttaaatttttttgagaattatttgttagttttatttaattatatttggcgaggttaatttagttttttttaacgaaaaggtaatggttttttttgagggagttgtttttaagattttgtgattttatttaatatttatttttaatatttttttgtgattttagatgcgtaaatagttttgagttttagtatgttttgaaaggtgaggtggaatatgttagtatgacgatttagagaattaatgtgataatgtgatgaaaataattaaaaatgtttaaaagtttgtgttttaatgtttattatttgagtattttatgaattttttaaaattttaaatatagaagaatttttttatataaagatgtttgttaaaatattatttataataagacgaaatgaaggtagacggatttaaaaaaagaagttgggttatatttttttatttgaaatgagatatggtttgtaaaagtgtataaattttatgtagagtttataatatggaaaattatttgtataataatatattttaaaagtaatatttaagataatttttaatatatgaatgtaattttgtaaaatgatagtatatataaaaatatatatatagaaaataacgaaatgaaaattagtattattgtataagatagttttagggattattatttgtattgtagtttataaaggtttaataatataatagtagtgattttttaaagaaaggtttaggtgatgtttttaattgtttgtgtattttaacgttttttgtgattaaatagggttttatttttgaatataaaaatatatattttaatatttaaaataaagtatttgaagtaaaataataatgaaatgaggttagatatggtggtatgtatttgtagttttagttatttaggaggtcgaggttggaatattgttggagtttagaagtttaaggacgtagtttattatgattatagttgtgaatagttattgtattttagtttgggtaatatagtaagattttatttttattataatattagtaatagttataatttttttttttttttaggttaaagttatttttttatttgaatttaaagggtagaaatgtttatcgagtgttttattagagaaaagaaatgagttttttttttataatttatgatttaatttttggttatagagtttagttgagtaataaaggtaatattaagaatattattaatatatagattacggattgttatgtatgtgtttatgtataaatgtgtgtgtttatatatatatatataattattataatatttgaaagagggagatggatttttttattttatagatgaaaatttgagtttttgtgtattttgaggtttggtttgggtttattgaatattagttttgagaattgggagatattaagttttttgtagagtttatttaggtatgagttatattagtggagattttttaatagtaggaagagtaattgagatttaggaatgtttatatttgtagagggtttacgtttagtggaatataattgaaggatgggtgaagggtatagtttagttgttttttttagttgggggtggtagatgggtgggttagttagttatttatgaggtgtattatgtttttagggttgttttttatttttttgttgagaattttattttgtatagataaaaattatatatttattggtgagtaggattttttttagaaatgtaaatataatttttttaatattaaagttaaatatttttttttttagtgaattattttatttggataattttttaattttttttgaagttagttttagagttgtatttgagtatttggaagtaagatagaaagttattttggggtttggatttggttgattttggatcgtgttttgaaagtgtgggcggtaagttatttaggtgtcgaggtaagagattgaggatacgagttgttttagtataataaaatataaaataagaatagttgtattagatatagaatttagatatgattatatatgaatattattaattattagttggtagtaattattttttattttaatattataataatttttattttataattataatttaagaaaaattaggttatatagcgataggagatgaggggatatagtgagttgtgattagaagataagagtgcgagttttttgttatgttcggatagggttattagagggttttttggtttagcggtgacgttagcgtttgggaagacgttcgttgttaggtagattatggtttagtggtagtgaaaagtgttaaggaaaaatatttattatttagtatatttagagtttagagaagattttgtttttttattttttgtggagggtttgatattagttaggtttgttcgtagttattcggaggtttaatcgtttttttgtgatgttgtgttttagtggttatgtttttagtttgtttttatgttttattttgtatatttggttttgttttttagatagtagtagttaattagtgaaagtattaaaagtttttgatatgtagaaataatggcgtaagttgtttttttttttgttttttttttttttttgttttggttgttaggtagggaagggttttttgtttagtggatatatgatttatgtgattttatttattattggagatgatttatattttttattttgttttttttgttttgtatttaataaataatagagtagttagatattcggggttattattggttttcgtgcgtttgtggtagtggttttttggtttagttgtttttttttttatttttttgttttgtgtttttatttttatatttttttattatcgtatatagggagagatttatcgattttgtggggttggtttttgtatgaaaggaggttttttatttgtagaagagtaagggtgagttttgaataagagatgaaattttgaggagaaaagatagatgggtagatttttaagtaaatttggaatatatttgttagtttttttttagttgtgataaaatgtacgtaaatataaaatttgttattgtgattatttaagtgtataaagtagtaatatttagtaggtgtataacgttatgtagttattattattattaagttttagagtatttttattattttagaaggaaattttgtattcgttaagtagttattttttatttttttttgttattagtttttggtattattaatttagtttttgtttttttagattttttttttttgaatattttattaaaatggagttatataatatatggttttttgtgattggttttttttatttgatatgtttttaaggtttatttaagttgtagtatgtattagtatattattttttttgtggttaaataatattttattgtagaatagattatatgttgtttatttatttattggttgatgggtatttttttttaaattaaatagagaaaataaaagaggagttataaattattattttttaaaaaatatttgtttttttatttatttatgaagttatttttagttgtgtatttttttgttttatatgattttaagttgttatttaatgtttttttattttagtgtgaagtattttttttagtattaattgtagaataggtttattagatacgaatgttattagtttttatttatttgtgtatgtttgaatttttttattattttttatggagagttttgttaaatatgtaattgttagttgagataggttttttttttttttttgaattttaagtttgttatgttaatgttttttgaattttatggtttttgaagaatatttggtagttaattttatggaggatttttgtatttaatgagtttttttttttgttgtttttaagatgttttgtttgtttttgatttttaatagttttaatataatgtttgttagtgtggatatttttgaattattgttattttaaatgtttgagtgttttggatatttagatttatgtttttaaaaaaatttcggaagtttggggttattatttttttaaatattttttttttttttttttttttttttttttttgggaatttttaaaatgtatatatttgatgttgttttttagattttttttgtttttttttttttatatttttttttttttgttttttaaatgggtaattttaattggtttatgtttgcgtttattgattttttattttgtaaattaaaatttgtttttgaagttttttagttaattttttattttgttttttatatattttagttttagatttttatttgttttttttttataattatttattgatttttgttatttagtgaaatatagtttttttgattttttttagttatttgtttatggttttttttagttttttgattatgtttaagatagttgatttaaagtttttgtttagtaagttagtttattgttttttaggaataatttttttttattgttttttttgtgaatgagttatatttttatatatgtataatttatgttttttgaagttgaaaattagatatttttaatattataatgtggtaattgtgaaaattatattttttaaattatttttgtatagattgtattttttattgtatgtggttattgaagttttatagttgtagatgtgtggttttatttttgagttttttattttattttattggtttatgtgtttgtttttgtattagtattatgttgttttggttattgtagttttgtagtatagtttgaagttaagtagtatgatgtttttagttttgttttttttgtttaggattgttttggttatataagttttttttggttttgtatgaattttatttttattttaatttttttttaatttaaataattagtaatgtataattttatttattaaatataaaataatttgaaaataattttttttttgaaaatttaagattgataaaaaaattaattaaaaagaatagtggttgaaattgaataaaatagtaagaattttaatgatatatttgttaaaatattttgaaataatgttttttatagatatatttatttattgtttgttggaatataaattttttatttaatattattgagttaatttagaatgatattattaaatgtagttttttaaatgttttagttagtattaaaaaaagataattttttgaatttgaaatatttttttttttaatttttattttattatgtagtagttttttaaaattttaggttgatttgaatagtatggtaaattattttaaaattggggaaaatttttttatgtttagatttaaaaaaaaaaatttataattattgatatgtttaatttttgattttttaaataagattttttgtttgtaataataaatattttaagtaaagttatttttaagattaaatatatttatttttaaatgaagtttgattttttataatttatattaatgatttttaaattttttttatagaagtatatttaaaaacggtagagtaaaatattttttttgaggatatgagtttaattttattagtttaagataagttttaaatggtttgaaaattttgagttttattttatatattaattttaattttatttttaatgttaattatttatatgaattttaaaatagttttttttaattttgtgagaaatgttaatggtagttgaatgagaatagtattgaatttataaattattttgggtagtatgattatttttataatattgattttttttatttttgagtatggagtgtttttttatttgtttgtgttttttttgagttatttaagaagcggtttgtagttttttttgaagagattttttaatttttttgtgagttgtatttttaggtattttattttgtttgtagtaattgtgaatagaagtttatttacgatttgattttttgtttgtttattgttggtgtataggaatgtttgtggtttttgtatattgattttgtattttgagatttaattgaagttgttttttagtttaagaagttttttagtcgaaataatggggttttttagatataggattatgttatttgtaaataaagataatttgattttttttttttttatttgaatatttttttttttttttatttgattgttttggttagaatttttaatattgtgttgaataggaatggtgagagagggtatttttgttttgtgttggtgttaaaggggaatgtttttagtttttgcgtatttagtatgatattggttgtgggtttgttatagatgatttttattattttgaggtatgtttttttaatatttagtttattgagagtttaaaaatatggaatgttttatgaatttgtatgttatttttgtgtaggggtcgtgttgattttttttgtattatttttattttaatatatgtgttgttaaagcgagtattgattataagtttttagaagtggagataattgaagaaacgtgggtgagatggagtgttgagttttatttgtagtaatttttgtatttaataaaatattattatttttgttttttattttttaattaagtggtaaaatgtattatagatttaaagtttaaatatttttgtattttggggatgaataatttgggtaggatatttaatttttttatagtttattggtggatataatttagtattattttttttagtatttttatttttaattgtttagaagtgattattttattatgttttttttttatgtattttttagttggttttagaattaatgttatttatatataaataataatgagtttattggttttttttatgtttttttatttttttgaatattacgtataagtttagtaattttttttaaagttttggtagaatttatgtgtaaaatagtttaaagttttataattgttttaatttttttatttgtagtaagttttttttattgttataattttgtttatagttttaaaattatttaaatttttattatatttttagtggtatatttatttattataatgttattttatttttaattattattgtttgttttattttttcgttaaaaaaatagttgtttttggtgggttgggtttttagtagtggtagttgttaggttagttttggtgagtggcgacgtaattgttgtgtttttgtagtgtttatcgtagttattacggttattttatgtagggattttatgagtaaggtttgtgtggttgagtggtatcgtttattaagttattttatttatttggttatagggagttttatttttttaaagattttttggtaggtatttatatataattattattgttatatattcggtttatagtaagaggtttatgcgtattttttttttttattttttagttttttaattttattttttttaagtttgtgattggttagttaagttatgagttattgtttatgattcgtttatttatgtattattggatattattttatattttttattttttatgggtttgtttgggtttgatttttagtttttggttcgagagttatttttaaagttgttttggtgttagtttttaaatttattgtttttgttgtagatttttttttttatatgtatttgttttttggaattaaaaataattgtattaatttttttaatttagtatttttaaggatgtgtagtaggagtgattttttttagcgtagatagaattgttttaaaatattagtaaaatatatttgagtgaaggatagtatgcgtggagaaagaaggataatttataagtgggtagtggagttttatatagtgaatatttaggtaaataatatttatattaaagtatattaattatagttttttagaaatattattggattttatttagttataaattattttttttaattttagagtagttatttttgatttttaatatagataagttttgttagttttagttgaatggtattatatagttattattatgtttttgggttttattattttgttgtgtgtggttatagtttatttatttttatggttgtttaatgttttattttataaataatttatattttttgttttttcgttgttgatagataattgtgttatatttagattttataaatcgtgatgttatgaataatatttttatatattttggtatatatatatatgtatttttattggttgataattaagattgttattgttgggttataggtgagtagatgtttggtttagttttttaaaaagtaagtttttagtagtaaataaatagtataggagggtgaattttttatttagaaattatttagataataaatgaggaaggaatgagagattgagattataataattgttttgtaatttattaagaattaatagatttaattattgaatagtaatagcgattaataatataataaaaaaaattaatgtgaggtttttttttttgatggaagaatataatatagtattattaaataaatataagtgagaaagaaattaagtttgaatagaagttaatttttatagttaattattaatttagaggtaatatagataataaaaatatatatttaaataatggtttggggagtaattagtaaaatgtatattatgggaagttttattatataatataaattttaagaaagaatttatagaataaaagagaataaaagtatgtttttaaaggtaaaattaaattatagttttggatgataaaaatataaaatagaataaagaagttatgatcggaaaagttaggatgtatttttatttgggggaggaaagagtttattgttgagttggggtaaatgatggggtttttggtttgtttcgtaaacgtttatttttggtggttaatgggtgtttattgtttattaaaggatataaattttggattttttttttttttttttggagttttagattttattttatgatataaaggttaatgaaaaaataatttatagagtatggttattgttttgtacgaagcgtttttttcgttttttttttgagtatttaggataattagtagttttaggatttttagaaggggtgattttatttttaggtgtgtatgtagtttatattattagaggtaatatgtaggtttatttttggatttttggaagaatttgataggatatagttgaagggaagtttttttcgttatttgtaggtttttggttattagtgtagagggagcgggtttttatttttttataggcgtttttacggttagagttttttttttgtatggggagtaaggtttggttttttttttgaatacggtgatatggatttcgttaaaggtggagataatattattttttttttattaattttacgttttttttgttttataggaagattgacgtaggttggtgtttagtgaagaaatgcgtggtgcgtaggaaggagaggtggattttagggttgtgcgtgatttgtaaaggaagcgtatcgattattaggtggcgttgttgcgttgtttttgtttttaggaggtggatgtttaggacgagttttgaggtggagagagggatgttatggtttattttttagtttttaagtaaaaatttttcggttaattttggtcgcgcgttttggtgtagcgagcgggtttggaggagtttatcgttgttgttatggttcgtttgttaaattgtatcgtcgttgtgttttagaatatgggtatcggtaagaacggggatttgttttggtcgtcgtttaggaatgaatttaggtatttttagagaatgatataatttttttagtagaaggtaaatagaatttggtgattttgtgtaggaagatttggttttttatttttgggaagaatcgatttttaaaggatagaattaatttagtttttagtagagaatttaaggaatttttatagcgagtttatttttttgttagaagtttggatgagattttaaaatttatttaataattagaattagtaaatagagtagatatgatttggatagttggtggtagttttgtttataaggaagttatgagtcgtttaggttattttaaattatttgtgataaggattatgtaggattttgaaagtgatacgttttttttagaaattgatttggagaaatataaaattttgttagaatatttaggcgttttttcggatgtattaagtataaattttaagtatatgagaagaatgattaatatgaaggtgttttttggtttattttaagttgttttttttttttttgaaaaaaaagtttatatttttatattagaaaaaaagatttttgttgattttagatttttggataattatttttaagtaatatgtttttattttttattaattttgattatattagatatcgtttatgaaatatttttgttataattaagtgtttttttaagattttgattgagtttttagtatttgttatagtgagttgttattttatatttatcgtatatgggatttttgttagtttttgatattgtcgggttttttaaatgttggtagtattttttaaagatgaagatgtatatattttttaattgagaagttttattagtgggaaatatcgaaagttttttacgtgtatatttagaggtttgtacgtaaatgttgtagttttgtttgtaatagtgaaaaattgaaaataatttggaagtttagtgatgggaaaatgaatatatttttgttttttggggaatttaaagtaggttttaagattgtaattttagtgaaagtagtttattttttaggttttattagaaattattaattgaggtacggagaaatggaattgagaaggtaagaaaattagtttaaagttagtgagtaggtttttattggtaataaattttatattgttgagatatagggaaacggaggggagaaagttggtatattgattttttattttttggttgttagttttttgttttgtgtgtgggtagaatgtattttagttgttttatagtaagttttaggtgtttgtagtaagaagttgttggtatgtatgtgaacggtgaatggtaaatatttaaagtaattttatgtttaagtatataagttttttatattttttttttttttttgatagagtttcgtttttgttattttgacggagtgtaatggtataattttagtttattgtaatttttgattttttaggtttaaatgatttttttgttttaggtttttatgtagttgggattataggtacgtgttacgatgttcggttaattttgtgtttttggtgaagacggggttttataatgttggttaggttggtttcgaatttttgatttgaagtgattcgttcgtttcggttttttaaagtgttgggattataggtttgagttattttagatttttattttttttatgtagtaaaaagtataaagttatgtatggtttatttgaaatattttatgttttaaaaaaatatagaagtaggaaaattaattttaagtttaagtgagggatgatggtagtttgaattaaagggttgtatgtagtaagaaattgtgatttaagatatattttaaagttagaagtagtaggatattttgatggagtttgttttgggtttgggtttattgagtttgagatgtttttgagaaaggaagaaagtagagagagaataaaagaaaaattggttaggtatagtggtttatgtttgtaatatagtggtttagtattttgggaggtagagataggtagatattttgagattagtttgggtaatatggtgaagttttatttttataaaaaatataaaagttagttgggtattgtggtgtatatttgtagttttatttatttagggagttgagatggaaggattaattgagtttgcgagttcgaggttgtagtgagttgtgattgtgttattgtattttagtttgggtgatagaagagattttgtttcgaaaaagaagttgaaaataatggaattatgtttttagaattttagaaagaaagttatttttaacgaataaatttatatttagttaaataattaagggtgaaggtaaaataatatatttttaggtaagtaaagatttagggtttatttttatgtattttttgttgggaaattattggagaaaatattttagtaaaatgaaggagtagataaattagagaatgatatggatttagtaaataggatttaatataggaaatattttagttatggagttggttttaaaaagaaatagtaaaaatattaataggttagttgggtggaatggtttatgtttgtagttttagttatttaggaggttaagtaagaggttggtttgagtttaagatttttagattagtttggttattatagtaagattatttttttttaaaaataataataagttattgttagatttggggtatttggaaagtagtttattgaagataaagtaaaagttaaaaaaaaaaaataagggggaagggtggttaggtaattattaattttagggtagaaggaagtataaggtaggaagtaagagtataatattttgttttttttaataatgagtaatatgtatatatttataatgatgtggtgattatttagtttttaaatttggtaattattttgggataatatggggggaaaagtgaaggtagtgatggtgtaagagttaaatttttatttgttatattaagaaattattatagaatgtataaaataattaagaaatgattaagtagttatgtgagaaaaaaatagaagatattgttaaaagagttaaaagttattgttttggagaattaggagggatggggtaggggattgttagggtgtattataaattgaagaggttttttaaaattatatgtattaatatatgtatttatttgaaaaattaaaaaaataataatttggaaaaatttatgaaggtaattattaggaggaaaaattaagagaatgaaaagtgtttgtttttcgagagaataattggtaggattgttgtttttattgtaagatttttggagttatttgattttatttaattatttttatgtatttttttaataaaaataattttattataataaaaagttatatttgtttatagaaaataaataaataaataaataaataaaaaaatttttttgtttagtttattttattttttttgaatttttagcgttaatgaggattgttttttttttatttgtttggattgggttttttaatattggaaagtggatgtgatttttagttttagtaggttttggtttattgtgttgttagtaaaataaaattaaaatatatattgaataaataataaataaaataatttatggtgagtaaaggtttataatgtttgttgttgttgttgttttttgagttaagattttattttgtggtttgggttggagtttagtgatgcgattatagtttattatagatttgaatttataagtttaagggatttttttattttagtttttttaatatttgggaatataagtgtttattatcgtgtttagttaagtttatttatttttatattttttagagacgaggtttttataatgttgtttaagttggtttttaatttttgattttaagtaatttttttgttttagcgttttgaattgttgggattataggggtgagttgttatgtttagtttgtaatgtattgatatttttaagatttttttttttaagtgtggatatagtagtagatatttttttttttttgggttaggatattgggtagagtggaagagtaagataataaagttattgtagaaagtatttatgtggaagaggtttagtagggagggttagttgttttagggatattatatttagggataatttttttttttgggtaggattgttttttgattatttttatatttacgatagttttgaaatcgtaggatgatgagatttaagattggttaggatttgtttttaaaaaattattttcgagatttgttaattttttgaatggtttttagtgttttaattttttttagaatttaatttatttttaatattttatagattatttttagttaataatgtattagtgtttataaatatagaaatattgtaattatttattttttataaaatgtttattttttatggtatagatattatatgtaatatatttatataggttgtaagttttacgataaaaaatttttttttatttttaaatagttttatgtatataaagtaagaataaatgaggggagtaagatagttttttgtatttagtttaatatttattatttttgattatttttattttttttgataattttattttttatttcgtattatttgtttttagtttgaagaattttttttattaattgtaattgtatagatttgttggtgataaatttttttaatttttttttatttgatatattttatttgtttatttttgaaggatatttatgttggatatagaatttttagttgatttttttgttttttagtattttaaagatgttattttatttttttttgtttttatggtttttaataaaaagttattgattaggataagaggaatagagaaataaaaatcgggaaaataatatggtagacgtgaaatttattatattaataatgataaaaatttatatgaatttatattttaatgaagggtagagattgtgtgatttggtttaaaaaaatatagaatttaattatacgttttttttagatatgtattttttttgttttttttttttaatttaatttttatttttagttaaggggtatatgtgtaggtttgttatataggtaaatttgtgttatggggttttgttttataaattatttttatatttattagtatttatttaagtattaagttttagtttttattagttattttttttgattttttttttttttttattttttatttttaagtggattttagtgtgtgttgtttttttttgtaggtttatgtgtttttattatttagtttttatttataagtgagaatatgtggtatatagttttttgtttttgtattagtttgtttagaataatggtttttagttttatttatgtttttgtaaaggacgtaattttatttttttttatggttgtatagtattttatggtgtatatgtgttatattttttttatttagtttattattgatgggtatttaggttgattttaagtttttgttatggtgaatagtgttttaatgaatatatgtgtatatgtaagttatttattttttttttttatttaatttattttattttgttttaagttttagatatatgtgtagaacgtgtaggtttgttatatacgtatagtttgttatagtggttttttgtatttatttatttattttttaagttttttttttttattttcgattttttaaaaggttttggtgtgtgttgtttttttttttgtgtttatgtgtttttattgtttattttttatttaagagtgaggatacgtggtgttaggttttttgtttttatgttagtttgttgacgatgatttttagttttatttatgtttttgtaaaggatatgaatttatttttttttatggttgtgtagtattttatggtgtatatttattatattttttttatttagattattattgatgggtatgtgggttggttttatgtttttgttattgaaaatagtgttgtaataaatatatttgtgtatgtgtttttatagtagaatgattgatatttttttgggtatatatttagtaaagggattgttgggttaaatagtatttttggttttatatttttgaggaatggttatattattttttataatggttgaattattttatatttttattaatagtgaaaaagtatttttatttttttatagttttattagtatttattgtttttttattttttaataatcgttattttggttcgtaggagatagtatattattgtggttttgatttgtttttttttaatgattattgatattgagttttttttttatatgtttttttttttgagaagtgtttgtttatattttttgttaatttttgatagggttgtttttttttttgtaaatttgtttaagttttttgtaaatatatatgtgagtttttattatttttgtttaaatatttaagaggtatttaaattagtgtaatatggtaagaaaatgaaataagaaattaatagaaggattaggtatggtggtttatgtttgtaatttttgtattttgggaggttgaggtggaaggattatttgagtttaggagtttgagattagtttgatagtgagattttatttttattaaataaaaataattttaaaagaaaaaagattaatagataggaaaggaagaaataaaagtttttgttattaattttattgtatatgtagaaaatattagggaattttgaaaaagtttttggaattaattattgaatttgtaaaatagtttataaaatatatgtaataagttatttagatgaatatgaaaagatagtaaataatattagttattaaagaagtgtaagttaaaattataatgagaaattattatatattatttagaatagataaagttaaaaagatattggataagtttaaatattgttaagaatatggaaaaaataggaatgtttgatattgttggtaggaatgtaaaaaatgtggtagttaatttgtaaagtggtatggtagttttttatatagttatttatttattattatatggtttagtaattttataaatatgtatttatttaaaagaaataaaaatgtaaggttatatttgtaagtagttatttatagtggttttattaataataaattttaattggaggaatttatatgtttattaattggaggtagagaaattaatgaataagttgggattttagtaatatttagtagttgtttagtaataaaaatgaatgaatggtattattttatatatcgttatgttaaaggagagattaaacgaaggattatataatatacgattgtacgtttattatattttagaaattttagtattgtagtgatagaaaatagagtggtggttgagtgaagggaaggggtgagggtgggaggtaaggattaaatagaaaggggtagaaagaaagtttttagggaaaagaaacggttttttatagtgttataatttagaagtaattgggtggtgggaattaaggggagaggagggtgtgagggaagaggatagagagaagggttggggaagtaggaggtgaggataaggagtaggagaaaggattttaaagtagtggaggagtttagtaggggattttttgtattttgggtttttttattgggtagtgtggtagttatatgattataaataattattaatattcgttaaaaaagcgtagttaaaattggtgaattttattatatataaatgttttaataagtaaaaaaaaaaaaaagggcggggggaggggaggtaaaaataaagatatttttagataattaaagttataaaattaattttttaggggttttgtattatatttaattttaaaggaagtgttttagggtgaaggaaaatgatattagatggtgatttagatatatagaaaggaataattaataatagaaatgatgtatatgtatatgttatatttatatttatttttttaattttttgaagatatatggttatttgtttaaaataaaaagtattgtattgtattattgagtttataatataggttgatgtaatatatataataataatagtataatggtaggttataagaaattatattgttagaagtgttttttattttgttggatgtagtttaatataatttgaattttattgtgaaaagttaaggaatcgggtttttattttttgttattgtgtaaagaaatatagttaaaagttattaggagaattaaaattataaattaaaaaatgtttatttgatatataagaaagtagtaaaggaggaatagaaataaaaagatatgagataaattgaaaacgtatagtaaaatggtagattaaaatttaattattgtaagtgaagaaatgatatgatttgagttatattagtaggattgttgagtattgtggggagaatagatatgggtaggaggtgagggatagtgttagtgttataatttaggagtgatagggtggcggggattaaggggagcgggggtgtgagggatgagaggggtagatagaagggttggagaggtaggaggtgaggaaaaggagtaggagaaagaaatttaaagtagtggaagagtttggtagagggttttttgtattcggtatttaatatattttgttggattttttaaaaattaattggttttttatgattaaaaaaaaaagagttataaaaatattaagtgtttagataaaatacgtatattgtttggatgtgtagagtttaggaaaataggtagtgttttagcgtcggtgaagagtattgggattgtatggagtattcgtaattttgaggtgatgattataggttttcggttgtaatagatagtaataaattttgtttttttatatttaggagatgttttggatttatatagggaaatttagggtggggaatgaagataattttaaatgtaataatttagagttatagatttatagtttgggaaagtaaaatttaggagttttgagagtttaattgtaatgttgttttgatataggttttttataaattggaattttaattatttagggattattaatattgtgttatttattgtattaataaataaaaaggaaattggtttttatgagaatttttatgcggtgtttttagagaaaattttattaggtttaaagagaaaatttttgtttttatatttttatttttagggcgagtttattttttggtattaagtttttcgtgtttagtttttttatataagagtttaagaggagaggtaaggagtgggaggtagggagtttagtttagggatagggattttaggacgagaagtgaaggggaaggggttgggcgtagtttgggggtttttttttggtttttatagatagatttttgtttaggatttaggtagatagtgtgataaagaggtttggtgtaggagaagagggattaggacgaagttttaggtttcggacggggtttttagggttttaggtttcgagggtcgcgtttgtaatggggaggcgtagcgttggggattttttatttttttgagttttatttttttttttaatttgtgtcgggttttttttttaggatattcgtgacgtatttttattttttatttttattgggtgtcggatatttagagaagttaattagcgtcgtcggggttttagttttaaagtttttacgtatttattcggatttagagtttttttagacgtcgagatgttggttatggcgtttcgaatcgtttttttgttgttttcggcggttttggttttgatcgagatttgggtcggtgagtgcgggtcgggagggaaatggtttttgtcgggaggagcgaggggatcgtaggcgggggcgtaggatttgaggagtcgcgtcgggaggagggtcgggcgggttttagttttttttcgtttttaggtttttattttatgaggtatttcgatatcgttatgtttcggttcggtcgcggggagtttcgttttattttagtgggttacgtggacgatacgtagttcgtgaggttcgatagcgacgtcgcgagttcgagagaggagtcgcgggcgtcgtggatagagtaggaggggtcggagtattgggatcggaatatatagatttttaagattaatatatagattgatcgagagagtttgcggaatttgcgcggttattataattagagcgaggtcggtgagtgatttcggttcggggcgtaggttacgattttttattttttacggacggttcgggtcgtttcgagttttcgggttcgagattcgtttttttgaggtcgcgggattcgtttagattttcgatcggcgagagttttaggcgcgtttattcggttttatttttagttgaggttaaaattttcgcgggttggtcggggcggggcggggttcggggggacggggttgatcgcggggtcggggttagggttttatattttttagagtatgtacggttgcgacgtggggtcggacgggcgtttttttcgcgggtataattagtacgtttacgacggtaaggattatatcgttttgaacgaggatttgcgtttttggatcgcggcggatatcgcggtttagattatttagcgtaagtgggaggcggttcgtgtggcggagtaggatagagtttatttggagggtacgtgcgtggagtggtttcgtagatatttggagaacgggaaggatacgttggagcgcgcgggtattaggggtagtggggagttttttttattttttataggtcgtcggggatggttttttacgagaagaggaggaaaatgggattagcgttagaatgtcgtttttttttgaatggagaatggtatgagtttttttgagttttttttgagggtttttttttttttttagataattaagggatgacgtttttgaggaaatggaggggaagatagtttttagaatattgattaggggttttttttgatttttgtagtagttttgggaatcgtgatttttttttttaggttttgttttttgttttatatttagtgtgtttggggttttgattttagtatttttgagttattttatttttatttagattaggagtagaagtttttgtttttcgtttagagattcgaattttttaatgaataggagattattttaggtgtttgtattcgttggtgtttgggttttgtgttttttttttattttaggtgttttgtttatttttaggttggttatatgggtggttttagggtgtgttatgagagatgtaaagcgtttgaattttttgattttttttattagattttttaaagatatacgtgatttattattttatttttgattatgaggttattttgaggtgttgggttttgggtttttattttgcggagattatattgatttggtagcgggatggcgaggattaaatttaggatattgagtttgtggagattagattagtaggagatagaattttttagaagtgggtagttgtggtggtgttttttggagaagagtagagatatatatgttatgtatagtatgaggggttgtcgaagttttttattttgagatggggtaaggagggggatgaggggttatatttttttttagggaaagtaggagttttttagtagggttagggttttttatttttttttttttttttagagtcgtttttttagtttatcgtttttatcgtgggtattgttgttggtttggttgttttagtagttgtggttatcggagttgtggtcgttgttgtgatgtgtaggaggaagagtttaggtagggaaggggtgaggggtggggtttgggtttttttgttttattgggggttttaagttttaggtagaagtgttttttgttttattattgggatgtagtatttatataggggttaacgtagtttgggattttgtgtgttagtatttatttttttgtgtagtatatgtgataatgaaggacggatgtattattttggtggttgtggtgttggggttttgattttagtatttatgagttaggggaaggtttttgttaaggatagattttaggagggtagttggtttaggatttatatttgtttttttcgtgttttttgattttgttttgggtttgtagttatatttttggaaattttttttgggtttaagacgaggaggtttttttaagattttatggttttgtttttttttagtttttttatagggtattttttttttataggtggaaaaggagggagttatttttaggttgcgtgtaagtgatgggggtgggagtgtggaggagtttatttattttataattttttttgttttacgttttttgcgggttttgattaggttttgtttttgttttattttaggtagcgatagtgtttagggttttgatgtgttttttatagtttgaaaaggtgagatttttggggtttagagtgggtggggtggcgggtttgggggtgggtggggtagtggggaaaggtttgggtaatggagattttttgattgggatgtttcgcgtgtgtggtgggttgtttagagtgttattatttattatgattaattagaatttgtttatgattgttgttttttgtagtttgagatagttgttttgtgagggattgagatgtaggatttttttacgttttttttttgtgattttaagagtttttggtatttttttttgtaaaggtatttgaatgtgtttgcgtttttgttagtataatgtgaggaggtggagagatagtttatttttgtgtttattgtgatttttgtttttatgttgatttgtgttttttttttagttattttttttgttttagagaggtggggttggatgtttttatttttgttttaattttacgtgtattgagttgtaattttttatttttttattgaaaataagaatttgaatataaatttgtttttttaaatatttgttatgagaggttgatggattaattaaataagttaatttttggaatttgagagagtaaataaagatttgagaattttttagaatttgtatgttcgttgtgttgagtttgttgtaggtggggtgtggagaaggttgtggggggtcgagtgtggacggggtttgtgtttatttggtgttgagtttattatgggttttatgtggttagtttttagttgggttatttttattgttttattgtttttgtttttttagtggaaatttgtttagtgggagttgtgattatagaggtttatatatcgttttgggcggtttttgtatacgggggtttttgtgtattttgagataaatttttagagttatttattttttgttttgtttttagagttttttttttgttttgtttttttgttttttttttttgttttggttttagtgattttggtgttgaatttaattttaatttaggaatttgtaaagtagagtttaatttagatttatatttgtttgtgaaattggattcgttattaaggattgtttttttttgaagagagaatttgattgtgtgttgtagtgtgttggggtagggggtgcggggagggggttgttgtagaaagagggatggggagggagggtatataagtagtattgttgagaaaaatataggcggtttttattttagtgtgaggggtttttgtgttgtagttgttataaaatagtatttggtttgaggttatgttaataaagatattgtttttaaaatagggaggtgttttatagtgattatttatttaattgatttttgttattggttagatataggatagaatggttttgtatttggggaatattattgaagtaaaagaaaaatttttggttttttgtagtatatgttttagtgggaagaggtagacgatagatatattataattagagtaaggaaggaaagtgttagaaggtggtaagtgttgtgaggtaggtgatttaggatgtgggtagtggggatagggaaggtggttgttgtgttgggtagttagtgtgtgttttgttgtaaaggtgatttttgaggaaagatttgagagatatgaggatgtttggggaagttttttttaggtagaggaagttttagtttaaatgtattatggtaggaaggtgtttgtgtttttagaagagtaaggaggttaggagggttggatagagagaaattgaggtgaggttagaggtgcggttagaataggtgggtttgaggggagtggggttggatttggtttttgttttgagtgggatggggagttagaggatagttttgagtagaagagagttatgatatgatttttgttttaaaaggatttttttgacggttgtgttgagaatagaattgagaggcgagggacgagggaggtagaagggaaaatagtaggaattaagtgtagtattttaggttggagatgtcggttattttgattggggcgtgagtaggggaaatagtgggatgtgaggggattttggatgtatttgaagatggatttatagtatttgttaatggattgtatttgtggtgtgagaaagatgaattaaggatatttatagttgtaaaatgagtgagtagaaggatggagttgttgttagtggagatggggagattttggtaggagcgttttgaggagggggtattataggtatttagtggaggagatgtttattaggaaggtaggtgggggagttggggtggaatttggatagataattttagagtttaggggaaaggattgggttggagaaatagatttaggaggttatattatatatattagatttaaaattttaagtatggatgaggtataaagggagtgattgattatggaaaagaatgagtataaggattgaattttggatttttagttttaaggggtgtgattagattatatttagagtagattgtatagttttggttttacgtttagaggatatttagataaggaatttttatgtgtattaggattatttggatgtggtgttgagatttaggaagtttggagttgagtaagagattttggatttatgataaggttggagtttatgttgttggtttttagattatatttggagtagtaagagttttaggattttatatgtttgagtattagttttatttttagggtttgttatataaatgattttttggttttgtgtataatattttgagataaggattttggggagtggtttgtgtattttttaagttttcgttagtaattttattgtttagatagattgggaattattgagattagtgattagagagtgtttagggtgggtgggtggggtgggtttttaaattttgtttaaaagaggattttttttatagaaagaaaagggaggatgtatattattagttatgagaggtgatattttttgttgttttttttattatggggtagaggttaggtagataatttaggatgtggttttcgtataaagaatatttttgaatgtcgttttttgatatttattcgtagattgattttttatttattttttggagaaaattatggaaattatatttttgtaatgtatatataaagtcgtatatttggtattgggggttagttttattgtggggaaggttatagaagtaggttggaaattatatattcgggaatagaatttatagtttattttggattaggttttttttaggaataattatttttgttgttgagtatagacgttattgtttatatttttgatattttggttttggatattggattttgaggttaggatagatgttattgttgtatatggaaattggatattattattgttatttagttatttttattaaaatgttttttgtatagttttagtttttttgttattttattttggttgagtttggtagtgatataggagttaagaagaaattatttagataggtagtgagggtatataaggtttttaatggaaagtaggttttaaattatttttttttttaataaggagtagtttgtaatattaagttttagatatagataagtaagttggaagtttgtacgggtgaatgttagtagttgtttaataggaataggacgtttgggattgggtatgtttataatggcggttttatttttttttttttttgttaggtacgtttatagtaaggagtagataatatgttatcggttaagtggaaagtttatttgtataataggatgagggtggggtgaatagttttttatacgtattatgtaaatattatatttggtataattaatttgtgggttttatataaattagatatcgtttttttaagtttgtttgtaaaattcgatgtatttttattttaggttggaatttttttttgggtgttttttttttttataagaaggagttgtttttttttgttttttttttgtttattaaattatttgattttaatttatttttcgtgtgttagtgtttttaatttttttggcgtgagatgacgaatatttagtatttatttgagataatgatatttttttagtaggtggttattagattggtggagtttaaaatttatgtttatgagtaattgtaggggtgattggagtgttgttgtttttttttagggagggaggtggtgtttgtttttttttaatattttatatgttgtaaattaaaaataaatattaaagttatttttttttaattattttaatggatatttttagttagggtgtttaaaagttaatttgaaagattggtttaggttattaagggaagtaggtattgaatatgttttattatgttttttttttttttggaatttaggaaaagttgattagtatttattattaatatagatttttagtttgattagaaatatttataatttattttttttgaagtttggtatttggaggcgttatttgtatgagaattttggattttataattttttattataatttagatatttttttttattgataataatttaattaattgttaattagaaaaattaaaaatttatttataatttagaagtattatttcgtaatttttgtttgttttaaattgttttaattttttggatcgaattaatgtatagtttaaatgtatttgattgatgttttatattttttttaaatgtgtaaaattaatttgtgttttaattattttgagtatatgttttcggttttttgagggttgtgttatgggttgtggttatttatttttggtttagaataaatttttttaaatatgttattgcgtttgattttttttattgatagtgtggaattttgatgtagtaagagggtttaagtgttggagtgtgaggggtggggaaaagtgataaattttaatttttggagtagtgatttaggacgagaattttatttagtatttagtaggtacgaagagtggttgaatgaattagtgattaataaataatatatttttatttatttttttgaggataggtttatattaagtttttgtttattttagtttatagtttagattattggagtggtattttgtaatgatgaaatgattatttaaatatttttttttagtatgatttttattaggattaaaatttttaggtttgtaagatattagaggttttgggtttatacgatgttttatattaatatttatatttttttgtgtgtggaaatgtttttggggagagaatttttaatatttattagtttttatgtgatatttttaaaggtttaaaaaattttaatttttagattaaaggtaggattattttacgtttagataatgaatagttggtagtaatttgtgtttagggatatgaaataaatgattatatttgtttatttttttttttgggatcgaagaaggtagaggtttatttgtttatttttattataagtttttttttgtgggatggtgatggggtttttttttatttaaataattttttgattttttaatagtagttgggagttttagagtttgatttaattttgatattaattatttggagttcgttttagattttataggtttattagtttatttttataagtttgtttttattttagaagtaagttataagtatcgggttttaggttatttgtatttttgtttaatatggttgtaaagttaggggttttttattttttaaggattgagaatttttaaattaatttaaagaatttaggaagttgttatagtcgtgtaaatcgaaaaatgtttgagataggttttagttagtttagaagtttattttgttaagttgaagatgtattttggaaatagagatttaaattattgtagtatttgtggtttatgtttttttttaataggtttttgaggattttaatatgtataggggaaagagtagttaggagaggaaaaaaatagttaattatgtatttattttatgtttagtaaatttgtattttaaataagataaagtaaacgttgggtagaaaagttaaatatgcgtttgattttgggtgggtggagggatgattgttagttttgtttttgttttgtatttgtgaagataagttgttaatttatattgttaggggaaaatttaataaaattgttttagagtaaatacgttggggtttataaggaattattttgtgagtagtttgtgagggaggttatttggggagatatatggttttttatttttgtagttatttgtttaggaataaaagaaaggtagtttttttattagtttttaaatttaatttttttttttggtatagtgaatttggagttttgaaattttattttttttttatatttagtattgtagttttttattgttatagtttaaatttttatttttttggtatttgggatcggttttatggacgatagtttttttatggattagtggaggtggtggagggtagagggaaatggtttcggatgaaattgttgtatttgagatgattaggcgttagggttttataaggagtatgtaatttagatttttcgtatgtagagtttataatagggtttatgtttttatgagaatttaattttgttattgatttgataggaggcggaattttggtgttatgtttaagtttttttatttaacgattattttttgttgtgcggtttggtttttattaggttaggaatttgtattagttcgtagttcgggggttaaggatttttggtttaaattatgttattagagtagaatttttgagattggataatttataataaatagaaatttgtttcgtttatggtgtcgaggatgagaatttttagattaagggattttatttggtagaaaataaaaggataagagagggtgagaggtggggggaaaggaagttaaatttatagttttaggtttttttataatgagttttagtttatgaatgaaggtagagttttaatggtttaattattttttaaaagttttattttttaaaaatgttgtatttgggatgaaatatttaatagatgtttttttggggaaatatttaaattatagtagttataaaagatataaatgagtagttagatgaagaggtgtatagagtgaggtttggaagggttttgagtataggagtttttgtttttacggagatggggtttattatttttttagtacgtggatatacggatgtgtttagtaattgggaagtttttcgaaatttaatttttagaggtttttatggaaattttattttgtaggtatgattaattaaattatcggttattgtgtgattgaatttaattttaagttttttttttttttttagattttagggatggggttaatagttttaattttttaattatagttttatgtttttggtaattagtttttattttgaagttatttaggagttttttattttatagttattttattgttatgttgaagttatgtttattattgaggagattgtaaatgttttagaatttggttgttaggaaatagggaaaagattaaatatttttattggattatagattatattttggttttgattatattatttttttttataatatttattattttattttagagataattttttgttttgttgtttagggtagaatgtagtggtataattatagtttattttaatttcgaatttttggatttaagtgatttttttgttttagttttttgagtagatagtattataggtgtatattaatatgtttaattaatttttaaatattttgtaggaatgggttttattattttgtttagtttggttttaaatttttggatttaaataatgtttttattattgttttttaaattgatggaattataagtgtgagttattgtgtttggttaattatagattttttatattagaagaattataatagtgaaaagattttggtatattattagaattttttttggttattaataatgattttagtgtaatttataaataggaatagttttagtaatatatggttgtatttttttaggtatttgggtaaaattgagttaagagataatattattttttgtttatattttttttaagtagtttatgtaatattggattttttttattatataatttatttatttatttatttatttttagttattatttttttttttttttatttatattaaatatttataattttggaaggaatattagtttttgttgttgtgttggttgagattgtagggattaatattgttttagtaagtgtttttcgttatttattttagtttatagagggtagggttatgtaggtagagaattggttggttatttgattttaggtaatatagttgtatttagtgttagttttaattttgttagatgtagtgaaggtataatttatttttataggtttttaggaattattatataatggatataaaatatatttatagttttttgtttaggaataatttttgtttttgaattttatttgtatttttagttttgggattattgtattaggtatgagaaaagtaagttgaggtgaattatagttattattttagtgtttttttattttgggaaggaatatatataggattatatttagtatttttttttgatttattaggaaaagagaagaatatttttatgttaagtgtgagtatatttatgaaggtgtataagtttattttttgtgtttgtttttttatttttttttttatatatttaattgattattttaattttttatggaattttttttttgaggaggatatttttttgtgattattgttggatattttgagtaggtgtattttttggtgtaaagaaatatgattcggtggtttatatggttgtagtattttttatttaagtttttttgtaatattcgagtatttgtatttgagataaagtagggatttttttagaagtttgtcggggtttttcgatttggaaataaagaaaaatttagtttttttaagagaaattttaggtatttagttagttttaaaaagtaagtttgtgatttataagtaagaaggaatgatagtttgaaataatagttaaggaagttagagttataagatgttggattttttgtagaaattaaaaataatatttttaatatattgtttttgagttgttttttagaaatatggatttttttttaatagatttattgatagggagattttataaaggggaaattgagaatttgaattttgatcgtcgttttttgttttaaatttttttttgagggatttggagagagataagtttatagaataggtttgaatatttttttttattgtttttaattgtgtaaggaagttgtgtaaagaagttttgtttttttatttattataaattagaaaatttttaaatttatttaagatttgtaagtttttttattaggatattttattttttaaggttaaagtagtgtaatttgtatgtattgatttatgatgttgtttgtaattttgttttttcgaaatttgtttttgtttttaaaaatttttgtttgtgagttattaaaaaggttgggttttaagcgtgagttgtttgattttttttgtttggcgttttatatataaatgtttttttttgttttattataattttagtgtggatgtttgtttttattgttttaggtgaatggattttagtttagtttggtaatatatttattattagttgaataaaggttattttagggtgaggatttatttttgttaagatttatttgttgttttttggggttattggtattagtttaatttgttagttatgtatttttaaggtttttttataaaagaattcgttatatagttatatgttattttttttttttttgttaaagaaaggattttttatatgtattttgtgtttgtgatgtgtggaatgtaagaggattatgttttgattttatttatttttgtattgttatagttttaatgtttatttattttatggatttaggtgatttttataagtaaatttggatttttttttgttgttatttttgagatgtggttttgatatgtttttttggttggttttaaatgttgtttaggttaaattttaatttttggatttaagatatttttttgttttagtcgtttttatagttggaattataagtgtatttggtaaatatttggagataaatttttgttgattttaattattttttaaatttggaagggagttattttgagggatattgaatagtattgaggggacggtgttaaaggatttatgagaaattgatttcgtgatttaattatttttttttttttaggttttatttataatgttggggattatatttcgatatgagatttgtataagaataatatttagtttatattaggtattaatagattttatattaatgaatattttaaattattatagtgattttcgtgggatttggtttatatgggtattttttttataggtaagttttttattgtttttttgattaattatacggttaggttattagttattttttgtaagttagtaaaaattaaaacgtaggagttttattattgtttaatttttttattattgttaagaaaatattatgtaattaagtttataatagtttttttgtttttattttttttgattaaagaggtggatttttaaatagtatgttgtttatttattttgtaaatgttgtatataaattaattagttgttagtgggttagttgattgatattgtagtttaaattttagcgttgtttgttatagagttttattttgtttaagggaggttagtgttttgtttaatttatatttttagtgaattgaatgaagtttatttatattatagatattaatttattttatttatagtttggttatttatgtgttaattttatttaataaatatttttataaattatttagaataatgtttgattatttatttaggtacgatgttttagttaagatgattaataaatttttttttattattatattttaagttttagggtatatgtgtataacgtgtaggtttgttatatatgtatatatgtgttatgttggtgtgttgtatttgttaatttattatttatattaggtatattttttagtgttatttttttttattgtttttattttacgataggtttcggtgtgtgatgtttttttttgtgtttaagtgtttttattgtttaatttttatttatgagtgagaatatgcggtgtttggttttttgtttttgtgatagtttgtttagaatgatggtttttagttttatttatgtttttataaaggatatgaatttatttttttttatggttgtatagtattttatgatgtatatgtgttatatttttttaattttatttattattgatggatatttgggttggttttaagtttttgttattgtgaatattgttataataaatatatatgtgtatgtgtttttatagtagtacgatttataattttttgggtatatataaagtaatgggattattgggttaaatggtatttttagttttaggtttttgaggaattgttatattgttttttataatggttgaattagtttatagttttattaatagtgtaaaagtgtttttatttttttatattttttttagtatttgttgttttttgattttttaatgatcgttatttttattggtgtgagatgggattttattgtggttttgatttgtatttttttgatggttagtgatgatgagtatttttttatgtgtttgttggttgtataaatgttttttttggagaagtgtttgtttatattttttgtttattttttgatggggttgtttgatttttttttgtaaatttgtttgagttttttgtagattttggatattagttttttgttagatgggtagattgtaaatatttttttttattttgtaggttgtttgtttattttgatgatagttttttttgtagtgtagaagttttttagtttaattagattttatttgttaattttggtttttgatgttattgtttttggtgttttagttatgaagtttttgtttatgtttatggtttgaaaggtattgtttaggtttttttttagggtttttatggttttagggatgattagtaaaattaattatgatattttttaatataagaatattttgaggaaattagtttgtgatttaataaaataaggagtaaataattgtttttaaaaatttataagtaatagttaaaaagttttttttagagattgttttttacgtttattttataattttgggtaaaaaaaaaaagtacgtatttgttgaaaattatagaagaagagaaaattgaaaaagtagaaagtgaaaaaataagaataataataaagatgatagtagttattttattggaaataatgtaaatgaggagatagatgagtaatatttttagagttttaaaaggaaaatgttgtgaaattagattttatttttagaaaataatattttttttaaatatatatgtatagttttaattgataaagtataatatatttgtgagatattgtttaatgtattgatatatgtgtattttatgtaatgattaaattaagttaatatattttgaatatatttattaaaaaataaagggattttaggttaggtatggtggtttatgtttgttattttaatattttgggaggtcgaggtaggtagattacgaagttaggagttaagattagtttgattaatatggtgaaatttcgtttttattaaaaatataaatattagttaggtatggtggtatgtttttgtaatttttagttatttaggaggttgaggtaggagaattatttgaatatgggaggcggaggttgtagtaggttaatattatattattgtattttagtttgggtaatagagtgagattttgttttaaaaataaataaataaataaataaataaataaataaataaatggattttagatatatagggagtgaaaaaataattagtagatttaaattataataaatgttttagttttttaggtaaaaagaaaattaagggattagttggtatagtatttaatgatgaagagataattttatcgtttttttttattgagatagagaatatagttttagggtttgggaattttttaatttaatttattattttgggtatttgtgtattttttttgggtatttgaggttggatgtaattattttagttgttatttatttgtaaatattatttatgggtattttatttagtttatcgtatttgtcgttaatagtgtatattgtttgggatttagagaagtagtttattattgttattgttaagttggttgtttaagagtcgaagtttttagtatttatttagttaattattgttattattgttatttaagtaagttatttggaggtttaggaattagtttattagtaattattaatataaatgttagtatatattattttggggtataaagataggaatatttagtatattattgttattattggagtttgaagattgttttatgtggtattttagtttttagtatatttttattatagttttattaataattatattttaatgtatagaagaaattatagatattattaatattgtttatagttaaagaaattatatagaggttatagtattttattatgtattatatttagaattaaatttaaagtattttatgtaattaatattatagatttatttttaggaaaatgttttttattatgaaataaaatttaaaaataagaagaattgattgttatattagatgtaaaaatattaacgttaggatatagaaatatgaaaaagtaaaaaagaaaaaaaaagtcgttaaggaagataatagattttaattaaaaagaaatttttaagattttagataaaggatttaaaatatttattttatagaagtttagtgagatataaaagaattttgaaaaaaatataaagaaaatataaaaataatttaggatataaataagaagtttataaaagatatagatttaaaaaaaatagaaattttggaattaaagaatttatgatatgaaattttaaatatatttgaaagttttaataatatattaggttaggtagaaggaagaattttaaaatttgaagatatatatagtgaaataatttaataagataaaaatatatataaaaaaagaatgagtaaagtttttgtgatatttggtataatataaataattaaatatttaaattattggtatttttaagggtaaagagataaagaatagattagaaaatttatttaatgaaagaatagatgaataatttttaattttagtaagtgatttagatatttagatataaaatgtttaataattttgagaaaaatataatgtaaaaagttttttattatggtatataattagattttttatagtataaggtaaaacgtaaattttaaaaatagtaagaggaaagtgtttagttatttataaaggaaattttattagattaatagtagatttttttttttttttttttttttttttttttgagacggagtttcgttgtgttgtttaggttggagtgtagtggtatgatttcggtttattgtaatttttgttttttgggtttaggtgattttttttttttagtttgttaagtagttgggatgataggtatacgttattatatatagttaattttttttttttttgtatttttagtagagacgggattttattaagttggttaggatggttttaattttttgatattatgatttatttattttagttttttaaagtgttgggattataggtgtgagttattgtgtttagttttaatagtagattttttagtagaaattttataggttagaagagaataggatagtataattaaagttttgaaggaaaagaattgttaagttaagagtaataaataaaatataagtattttttataattgaaaaaagaaattatttttttaagataagtaaatgttgaaaggttttattattattagatagggtttataggaaatgtttaagaaagttttaaatttggaattgaaacgatatttttaatatttttatattattattatgaaaatatatataagtataaaatttattggtaaagtaattatataaaagaggaagagaaaggttttaaatggttttattatagaaatttattaaattataatgataagtaataagagaaaaagatagtaataaaggatatataaaataattcgaaaataataatgtgataggaataaagttgttgggaataggtttttaaaaatttggttataaattggttttaaaattggttataaataaaatttttgtagtattgtgatatgtttatgatggttatgatgtttacgttggaaggttgtgggtttatcggaatgagggtaaggaatatttggtttatttaggcgggaaaattgtttaaagtcgtttttaaattataaataatagtatgagtgatttgtgttttaagggtatgtttttgttgtagataattagttaaatttatttttttattttggtttattcgtttgttttttataaggaatatttttagttaatttataatttatagaaataatgtttattattggtttgagttaataaatatgggggtaaatttttgttcgaggttgttagttttgaaggttatgagatttttgattttttattttatatttttatatttttgtgtgtgtgtttttgatttttttagtgttattgggttagggttttttcgattgagttagtttcggtataaagttttatatattaataaaaatttggaatgtaaatagattaaattttttatttataagatttagaatggttgaatgggtagaaaatatgatttaattatattttgtttatagaaaaatttatcggtaatattattttattataatttatagagatagaaggtaaaagaatggtaagaggttatttatggaaattaaaagtgagtaggagtagttatatttatagtagataaaataaattgtaagttaagaataatttttttaaaagataaggaaggttattacgtaattataaagagatttttttaagaaaagaatagaataattttaaatatatatgtattaaatattggagaatttagatttataaaataaatattattatatttaataagaaagatagattttaatataataatagtaggagattttaatattttaattttagtatgagatagattatttatatagaaaattaagaaagaaatattggatttaaatagaattttatattaaataaagttaatagatatttatagagtattttatttaatattatagaatatatattttttttatgaatatatggaacgttttcggggagagagtttatgttaagttataaaataagtttgaataaatttttaaaaattgaaattattaaatattttttttggttataatggaataaaattagaaatatatattaagagaaatgttggtaataagattaatatatggaaattaaataatatgtttttgaataattattgagttaatagagaaattaagatgtaaattaaaaagttttttgaaataaatgaaaatggaaatataatatattaaaatttgtgggatataggtaaatagggttaaaagggaggtttataagaataaatatttatttaagaaaagtagaaatattataaattaataatataataatgaattttaaggaattggaaaagtaagaaaaaaatatattaaaaattagtagaaaagaaataataaagattatagtagaattaaataaagatttttaaaaattatgtaaatgattaataaagtgaaaagtttgttttttaaaaatataaataaaattgataaattattagttaaataaatttagaaaaaaagagagaaaatttgttaagaataaaagtttttttttaaagtttttttttttggtttagaatgataagtgttaagaagatagttttttttaaaagttttttttaagttttttttgttttttatattaataaattttttattttattaatgattttttattgtgtttttaaggagttgttatatatagtaaagaaataaatatattttatgtttttgtatttgaattaaggtttaatttttttgttttttagtttgtttggatttgtttggatatgtttagatatgttttagttcgtagattatgttttttttttatttggaaatattattgtttttttggttttttataagtgaatttttttttttttttgttttttattgtatttttattttatttgggaaagtttaagtttttagttaattgggattagtttagattgtgtggtttagttttagttaatggagataggatataatagtagaaataatttgcgttaggaataaaaatttttgtttttttttgttttggtgtttttatggtaattaggtttatgggtagtatttttttgtagaagtaaaaattgttttgttgagaaattttttgtttaagtgtttgttttttttgtgatttcgagttttatttttaataattttttgggggtttatttattatttttatttttttttgggaaggggtttttggttattttatttaggggaggtgtattttattgttttattgtagtggttttagggacgggagattgagattatttattgtgacgaataaatttaggtttttagtaatgtggaaggagaaggtttgtaagtatcgtaatgattaggtaattgtgtatagattaaggtaaaaaaagttataagggtaatagtatttttttggtggtcgggatattttggaggttaaagggtgtgaaaggtaataagtattattgttgtgtagagtgagtgagtttaatttgtggttttgtggttattttatacggtttatggtggtttttttgtagggattttgatattggggtttatatagtttcgttgatgttaaggggagtttaattttttttgggaaagtagttagagtggacgaagtagaaggagaagattgtaaggaatttttaggataggggttaaatttttagggaaggataggtgaaaaatttttagtttaagggattgagtttaattagtatttaatatgggaaatattttgagtaagatagaaggtaaaaaggaaaaggtagatagtgaaattatttttgatagttttttaggatttatgttaaaatattggaagtatacgagaggattaaatataagaaaaagtaatagatgataaagtattattgttttatttggattaaggaatttattttaaagtttttagttttttggttaaaattcgggttaaatgaggattggattgttagtttttaatagaatatgtaaatgataaaagttttgttttttaggaggaaatatattatgttttgtgttggtggtaaaggtttatttttttttgttatttaaaaattaaaggagagaagttagaaattattttttatgaaattaatattttttacgttaagaattttattaatatatgggattttttagattatttttttttattaaatttttttttttttaattagtagattaatattttttattttttattttagtagatataatagttttagattttttttttatttagattttttttttttttttataattttgatttttggggttatttttagtttgaatgtttttttttaggaagattttaacgtgagttagaataatgtaaaaatgatatttaaaatttttattttttttttttttttaggggtttagttataaattattttttattgagggaagtgtttttaggaggagggggtattgtttttgtaaatgtttttttgattagtttagaagtttggagtttgaagagggaatttaagttatttttagacgatttttatgtagtgatagattaaatttattaatttttaggattttagttgtatattgggttgagttaatgtttattataggtattttttttttaggggaagaaaggagtatgacgtatagggttgttatgattatttgggagtgtgagtatttttttggttaaaacgtttttgtagttaaatagaaattttttatttaagatttttagtgggataaataataatatagtttataggaggaatatgagagatttgtaagaaatgataataaaaggaattagagaatcgttattttgtatttagaatatgattaaagtttttaatatatagtaaggaaaagatgaggggtttatggaattttttaataggtttaaggaataaatgaggaaatatgtttggtttagatggaggagatttatttggataaggaatgttaaagttttatttcgttataaatagttggttagatgttattaagaaattataaaagatagaaaattggaaggattgttttatagaggaatttttaagggaggtttaaaaggtgtatgtacgaagagatgaagaaaagtaaaaggataaggtaaagattatgttgtttttatagtagggaattttttaatagatagtttaaagaaatgttattggtaaattttttaggtattcgattgttagattttataatggaggtaaaggaattaaattagggaataagggaataaaaagaggaatagggtagaataaatgttttaagtgtgggaaggaaggttattttaaagagaatgttttgaatggaaaaaagaaaaagaaattatttatttatgatttttgaggaggaatggggggttaggggttttattttttttatttcgagttttattaagattttttgataaatttagaggtgggatttagatttttttaattgatttaggagttgttgattttttagtttgttattttttttttggtgtaatttggttataagaagaattttttattttgggagtaaaaggggaggggtttaaagtaaaagttttaggaagaaataaaaattaaatattagaattatttagtaaatattaaatttttgttaattttggaggtaggaagaaatttattaggaagagatttaatgttaaaattaaatttaggtttttgtgttaattaaggaaatttttttttttttttaaatttgtttgttattttaaatgagggatatatttatttagatgtatggttaaaggaaggaaattgaggaaagttataaatttttttaatttaagttaaattgaaaaatttggggtaagaggtaaaaagaaaataatatttaatttttttagaagttaagattaatttaaagtttataatagaaagttttttttatggtggatttattgaattttgtatgtttttttataatatttttatattgtttgtgaaaaagttagaggggttatatcggttagtgtaagattttcgatttattaattaaatagtttaaataatttattttgtcgattttaatttttatgttattattagtaaaattttttataattatgagtggtttatagtaatagatttaaaggatgttttttgggtttgtttattagtaaagatagtttttgaatgggaggatttttattttggttgaaaataatagtatcgatggatagttttgttttagggatttatagaatttttaaatttgtttggttaaatattagaatagattatagaaaagttttataaattattatatatatgtttgtttttaatatatggataatatttttattttaggggaggatagataaaaagtagaaggatttttaataggttttttaaaaataatttgtaattggaggggttatgagtgttaaaaaagtaaatttcggtttgtagaatttgaagttaagtatttaggggatttaattagtaagggtaaatggagaattggatttgaatggattgaaggtattatattttttatatgatattttgagataaagaaggaatttagaaagtttttagggttagtagggtattgttgtttatagagagatttttatgttttagtaattaaatttttatataaaaaaaatttatataggatgaattggatttttttatatggttttataagaaatatagtagataaaaaaattaaaagagttattagtgatagtttatgttttagttttattttttttagaattgtttttttatttttttgttaatgtaggtaatgaagtagttttaggggtatttatttaaatatacggaggttattggtaatttatagtttttttgttaaaaattttttatttagtagtttatggatggttcgagtgtgttttattagtggtagtaatagttttgtttatagaggagagtagaaaattaatttttggggaaattttattattagtattttttaataagtgagaataatttttaattagaaggtaggaaggtggtttattgatttaagaattttaaagtatgaagttattttgttagaaagagatgatttaattttaattattgatgatttaattaatttagttgtttttttaataggaaattttaatttatagatttttgatttttgtttagagtatagatgtttagatttaattagttattaaatagaagttagatttgatttaaatgaaatatttttttatattgggaaatatttgtttgtagatggtttttttcgagtaattaaaggaaaaaggtataacgagtatttaacgatagatggagatatttttatagaaatagagtttgaaaggttattaaatgattggtttgtataaatatgtgagttgtttatattaaattaggttttaaaatttttgtaaattaagaagtaataatttatatagattttaggtatgtttttggagtagtttatatttttgaaaaaatttggattgagcggggttttattaatagtaaaggttaaattttagattatagggatttaataatataagtattagaaaatttataattgttaaaagaaatagttgttgtatatgttttacgatattaaaggaattttttatttgaaggttagggaaataattttattgattaaatagttaagtaagttgttttttttttagtagaatttatttttcgattaattttttgttttttatttttagttgtattttttatttttttttaagtagattaggaaaaattgaaaaaaataggagttgaagaaaatttaaaaggaaagtgggtattattagatggaagggaaatgttatttaaattttatgagggaaatattgttatagttttattaaggatgttattggggtttttaaattatgtgtgatgtagtttttagggtttatgggtgtataagaatatatattttcgttaagtaaatggtggaaagttatatattgtgtagaaaatttaataagtagatttttaaaagataatttttcggagggagaaattttgggttaaggcggttttaaagtgtttaagttgattttattgaaatgtttttagtaggtcgttttaagtatttatcggtaatagtagattattttatttattgggtagaagttattttttttttaagtttaatagttagtaatgtggttaaagttttgttagaatatattatatttaggtttggaataatagagaatattgatttagataatgggatttaatttatcgtgtatattattaaaagattaatttaagtattagggataaaatgggaatattatattttttggtttttatttttatttgggagagtagaaagaatgaattaaattttaaagagttatttaattaaattaattttagaaattcgtttattatggataaaatttttttttattgttttattaagaatttataaattttttttcggagggattttggtttgtttttttatgaaatgttttatgggttattttatttaaatattattattgatttttttatgatcgaaataaaagattagttttttagaaattatgtatttggtttgttttttattttttcgttttttaggatttaaggtttggtagtatagattttattttttgaattttgggtttattaatattaattcggagattatacgtttttattaaaggttgaaaagagggaaagtttgagtttatttgggaaggattttatttggtgtttataataattgaaatagtagttcggattattgagaaagggtggatttattatattcgagttaagtaggcgttattttttttagagatatggattattatttcgttaatttttattagagtaacgataaaaagaaaaatttaatttattttttttttttttttttttttttttaattgtttttattttattattaatgtaattagattaagtttgtttaaaattattatttttgatgtttttttagttatgttttgtggaaatttataggattaaagatagtttattgttttagataaatatttttgttttttttgaatttttttagattggaaagatataataaatttttgtaaagattatgataattttaaaaatagtagttgtatgaattggtgggaatgggatttttgtttttttaaaatagagtttttatgttatatttggtttaatgttttatggaatattaaaggtttaggttggattgtttttattagtttttgttagtttttaaagttatatatttattttataaaagggattgttttttttaaattgtttatataattagtgtaattttattcggtttattattattattgtaatattttaaaattttttttttttattaagtcgtatttatagtataggggttaatattttgggaaaggattttaggggaatttttgaaatttgttttattgttttttttatttttttaatatattttttttaaattattattttatttatatttagtgataaaattaaagtagttatagtagaagtaaaagatttgaggtaaattttagttattgaaatagggttttaggatgtaaatgtttggttggaatggattaaatatttatttatatttaaaataagagcgattgttatgtttgggtatagggtagattagaggtttaaattgttttttttttatttagatggttttgtaatagattagatatggattgtatggtagttttgttttaagattttatagtttggggtaataaatcgtgttaaagattttttttgttgttttttgaggtttagtattttgcggattagtttttaaaggttatttagtttttattttttgggattaaatttgtttcgtgttttttataatagggagaaaatttggttttttttggaaatttgataggatgtagtgaggttaagtatttttaagagttaatttattagtttttttttatttattttcgagtagatgtatggtggtattgtggtggatttttgtgggagattttgttaaataattggagtggtatttgtattttaatttaattggttattttttttattttgatattttatttataaaaatattaataattaggtatcgtagtataagaattgtttttgtgagttttttgattttaacgtttatatagatgttattggagtattagatgaatttaaagtttgaaattaaatagttgtagaatttaagttattatttaggtgggtgattattaataaaaatatagattggatagttaggcgtagtggtttacgtttgtaatcgtagtattttgggaggttaaggcgggtagattacgaggttaggagtttgagattagtttgattaatatagtgaaattttgtttttattaaaaatataaaaattagttgagtgtggtggtacgtatttgtaattttagttatttaggagagttattttaatttgggagttggaggttgtagtgagtcgagattatattattgtattttagtttgggcgatagattgagattttatttcgaaaaaaaaaatgtaggttgggtaaattatatttattataattagtaatgatttatttttttttaattaattttttttttttagtatttattgattatttttgggtgttttttggagagggggatttggtagggttataggataatagtggagggaaggttagtagataaatatgtgaataagggtttttggtttttttagatagaggattttgcggtttttcgtagtgtttgtgtttttgggtatttgagattagggagtggtgatgatttttaatgagtatgttgtttttaagtatttgtttaataaagtatattttgtatcgtttttaatttatttaattttgagtggatatagtatatgttttagagagtacggggttgggggtaaggttatagattgatagtattttaagatagaagaattttttttagtatagaataaaatggagttttttatgtttatttttttttatatagatatagtaacgatttgattttttttttttttttttatattttttttttttttattcgataaaattgttatcgtttttatggttcgtttttaatgagttattgggtatattttttagacggggtggcggtttgggtagagggttttttattttttagatagggtcggtcgggtagaggcgttttttattttttagacggggtagtggtcgggcggaggcgtttttaatttttttttcggacggggcggttggtcgggcgggggttgtttttttatttttttttcggatgggttggttggtcgggcgggggttgattttttatttttttttttgacggagtggttggtcgggcgggggttgattttattaattgtataagggatgttatgagggaatagttgagtaattaggatttattaattagatgatttgggaaaatagaatagtattagatatgatattagtagaaaaaggtaaggtttgtgttatgattggaatttaatgttgtatttttatttttaataatattgtttttgatcgaattataataaaagtattataaggttttattgttttattaaatgaattagttaaaaattttggaataaatgatttttttattagtttaatggaaaggtggtttgttaagtggaaaggatttatgtttttaatttttattttattggtttttataattagtgtatttatttttgtagaatgttgtattatattttgtatttatggattagtgtaaaggtttatagaaaaggtttttattaaaattttttttaattttttttatttttatttagataagttgttttttttaattgattaagaagagtaataaaattaagatatgttaaggagatttgaagaggaagaattgtaaaattaagagggggaaattgtaaagaataaaagtatttttttaaagtttttttttttggttaagaatgataagtgttaagaagatagttttttagtcgggcgtatagtttatatttgtaattttaatattttgggaggttgaggtaggtggattatgagtttaggagatcgagattattttgattaatatggtgaaatttcgtttttattaaaaaaaaaaaaaagaaaataggaaaaaaaaattagttgggcgtggtggtacgtgtttgtaattttagttattcgggagattgaggtaggagaatcgtttgagtttcggaggcggaggttgtagtgagtttaaattgcgttattgtattttagtttgggttatagagtgagattttgttttaaaataaataaataaaaaataaataaaaaaagaagatagttttttttaaaatttttttttaagttttttttattttttatattaataaattttttaatttattaatgattttttattgtgttttaagtagttgttatatatagtaaagaaataaatatattttatgtttttgtatttgaattaaggtttaatttttagtttgtttggatttgattagatatgtttagatatgttttagtttgtagtttatgtttttgttttatttggaaattttattgtttttttggttttttataagtgattttttttttttttttgttttttattgtatttttattttatttaggaaagttaaagtttttagttaatcgggattagtttagattgtgcggtttagttttagttaatggatataggatataatagtagaaataatttgggttaggaataaaaatttttgtttttttttgttttgggtgttttcgtggtaattaggtttataggtagtatttttttgtagaagtaaaaattgttttgttgagaaattttttgtttaagtgtttattttttttgtgatttcgagttttatttttaatagatttaaataaaattagaaaagaaaagagaaatattataattgatattgtaaaagtataaaagattattagagattattatgaataattgtgtattgataaattggaaaatttggaggaaatggataaatttttggaaataaataatttgttaagattatattaggaagaatagaaaatttgaagttttaatatatatgaattatttttatagtggttttagtgggtttttgatttttttgtgattatttttttagtgtttgtttgtataattgaaatagatttatttagtaatagttaaaatttatagattagtttttttttttaatttttatttttagtttaggggtataagtgtaggttgttttataggtaaatttgtgttgtgggagtttggtatatagattatttaattatttaggttttaagtttattatttattagttattttttttgattttttttttttttttattttttattttttgaaagtttttagtgtttagtgtgtgttatttttttttatgtttttatgtatttttattatttagtttttatatataagtgagaatatgtagtatttggttttttgtttttgtattagtttgttaaggataatggtttttagttttatttatgtttttgtaaaggatatgattatatttttttttttggttgtatagtgttttatggtatatatgtattacgttttttttatttagtttataattggtgggtatttaagttgattttatgtttttgttattgtgaatagtgttgtaatgaatatatgtgtgtttatgtttttataatagaataatttatatttttttgggtagaatggtatttttttttttaggtttttaagaaattattatattgttttttataatggttgatttaatttgtatttttattaagagtatataagtatttttttttttttataattttgttagtatttgttattttttgattttttaataatagttattttgattggtgtgaaatggtattttattgtggtttagatttgtatttttttaattattagtgatgttgagtatttttttatgtttgttggttgtatgtatgtttttttttgagaagtgtttgtttatatgttttgtttattttttaatggggttgttttgtttttttttgtaaatttgtttaaattttttatagatattagatttttgttagatgtatagtttgtaaaaaatttttttttattttgtaggttgtttattttgtcgatagttttttttgttgtgtagagttttttagtcgaattagattttatttgataatttttgtttgtgttgtatttgtttttggtatttttgttatgaaatcgttgtttatatttatgttttaaatggtattgtttaggttttgttacggtttttatagttttggattttatatttaagtttttaatttattttgaggtgattttggtatatggtgtaagaaaggggttttattttaattttttgtatatggttagttagttattttagtataatttatgaatagggaattttttttttattgtttgtttttgttaggtttgttaatgattatagttgtgtgtggttttatttttgggttttttattttgttttattggtttatatgtttatttttgtattagtattatgttgtttcggttattgtagttttgaagtatagttgaaattaggtagtatatattggacgtggtggtttatgtttgtaattttagtattttgggaggtagaggtaggtggattatgaggttaggagttcgagattagtttggttaataaggtgaaattttgtttttattaaagatataaaaaattagttgagcgtggtggtatgtgtttgtaattttagttatttaggaggttgagaaaaggagaattatttgaatttaggaggtagaggttgtagtgagttaggattatataattgtattttagtttggatgatagggtgagattttattttaaaaaaaaaaaaaaaaattaggtagtgtaatgtttttagttttgttttttttgtttaggattgttttggttatttaggtttttttttggttttaggtgaattttaaaatagttttttttagttttgtgaagaatgttagtggtagtggtcgggtacggtggtttacgtttgtaattttagtattttgggaggttgaggtagtggattatgaggttaggagatggagattattttggttaacggggtgaaattttatttttattaaaagtataaaaatttagtttagtatggtggcgggtatttatagttttagttattcgggaggttgaggtaggagaatcgtttgaatttgggaggcggaggttgtaatgagtcgagattatattattgtatttttgtttgggtaataagagtgaaattttattttaaaaaaaaaaaaaaaaaattttttgaattcgttgattttttgagtggttttttatgtttttgttttttttaggagataatatttttgttaattttttattattacgttttgttttttgttagtttagggatatgtttgttttttgtttttaagtttttttggttgtgattttaggttgttaatttgaaatttttttaattttttgatgtgggtatttaatgttataaattttttttttaatattgttttagtttttttttagagattttggtatattgtatttttgttttaattatttttaaagaattttttgatttgtgttttaattttattatttatttaaaagtcgtttaagaataggttatttaatttttatgtaattgtatggtttgagtgaattttttagtttttattttgaatttgattgtattgtggtttaagtgattatttgttatgattttagtttttttgtatttgttgaggagtgttttatttttaattgtgtgattgattttagagtaagtgttatgtgataatgtaaaaaatgtatattttattgttttggggtgaagatttttgtagatatttattaggtttatttgatgtagggttgagtttaggttttgaatattttcgttaattttttgttttgataatttgtttaatattgttagtggagtattaaaattttttattattattgtgtgaggattttaagtttttttgaaggtttttaggaatttattttatgaatgtgggtgtttttgtataggatgtatatatattttagatagttagatttttttgttgaattgaattttttattattatgtaatgtttttttttgtttttttttttattttttttggtttaatatttgttttgttagaaataagagttgtaattttggttttttttttgttttttatttgtttggtaaatttttttttatttttttgttttgagtttatgtgtgttattgtatgtgaaatgggtgtattgaagatagtatattgataggttttggttttttatttagtttgttattttatgttttttaaatggggtatttagtttatttatatttaaggttagtattgatatgtatggatttgattttattattatgatgttagttatttattttgtagatttttttatgtggttgttttattgtgttattagtttgtgtattttattgtgtttttgtagtggttggtaattgtttttttatgtttagtgttttttttaggagtttttgtaatgtaggtttggtagtaatgaatttttttggtatttgtttgtttgaaaagaatttgattttttttttgtttatgaagtttagtttgtttggatatgaaattttgggttggaaatttttttttttgagaatgttgaatattggattttagttttttttggtttgtaggatttttattgagatatttattgttagtttgatgggtttttttttgtaggtgatttggtttttttttttggatatttttgatatttttttttttattttaattttggagtatttgatgattatttgttttggggatgatttttttatggagtagtttattggggttttttgtatttttgaatttgaatgttggtttgtttagttaggttggggaagtttttatggattatattttgaaatgttttttaaattggttttattttttttattttttttaggtatattaattatttatatattgtttttttatataattttatgttttttagatgttttgtttatttttttttatttttttttttttagttttgtttttttgttttattttagaaagttagtttttaagtattgagatttttttttttatttgttttattttgttattaatatttgtgagtgtattacgaaatttttataaagtgttttttatttttattaggttggttattagatttttttgttgatttttttttatttttatgggtttatttatttttaatttttgaggttgttgatttttgagtggattttttttttttttttttgtttttttttttaatagtttggttatttttttatagggttgtatagtttgttaggggtttgttatagtttttagttgttttagattttttagtatttgaaggtattattagtgaaggttatgtaatagtaaagatggtagtttgtttttttttttgggaggtttgttttaggaaagtatagatttgttgttagtttgaatatatttgtaggaggtgttggagattttggttgggaggttttgtttagttaggaggaataggattaggatttagaggtttattaaaggaggaatgtttttataggagatatagaaatgaattattgagttggaagttaagatagttatttaggttttttagagttttatgattttgaattaataaaggaaggagttattgtattgtttggggtgattggttttggttattagggggaattggtttattattatataatggtagtaaataggattgtgtttggaatataggagattttttagagtattttttagtaatattttgtcgtataattaaagttaataaaaacggtaataatttaagttaggtaggattagtaatgatatatattttttaggaatgaaggtttgagttatttaagtaggaaaagaaatttgattagttgacggatttgttgaaagaaatgggaatatgggatggttagtgaaaaataataaaaaaagtatttataaatattagttgtggtcggtatagtggtttgtgtttgtaattttagtattttgggaggcggaggtaggtggattgtttaagtttaggaatgtgagattaatttgagtaaaatgttgaaattttatttttattgaaaataaattataaaaaattagttagatttggtggtgtgtttgtagttttagttatttaggaggttgaggtaggaggattatttgtgtttaggaggtggaggttgtagtgagttaaggtaatgttattgtattttagtttgggtaatagaataagattttgttttaaataaataagtaagtaaataaataaataaataattagttgtaattatgtgagtatttatagaaataaaagatagtaaatgttattagtattatttttttatgtttttataatgatatttgtgtttgtgtgtatgtatttttatatgtattgagtaaatatttttttttttatttttttttgatgatttgtaataaaatataagatgtgttaataataatttttttttattaataaaagttaatttttattacgtatggtatttaggttatagtatattaaagagaagagtgtatattatgtatttttttttgtggaaagggttagtgtgtttttagttggatgtaagttaattgtattatttttggtaaaagtaagattttataattgtttttatttggagacgaagtaaggtttaaggaaaatgttaatgggtgttaagtttataagtatggattgggatggtgggttttatgtgttaattttattaaattatagtatttagttatttaattaaatattaaatttatatgttgatatgatggtgttttgtagttgtgattaaaatttgatattagttgattttatgaaaaggaaattattttaaaatatgtgggtgggattttttgaattatttgaaggtttttgggcgaaatgtgagtttttttagagaagaaaaaattttgttttaagatgatagtagtaattatattttaggtttttaatttgttagtttggtttataaattttagattgaaggttgtaatattatgattttttagttttttagtttgtcgaggtgtaatttgtgatattaataacgtaaaatgaggggtgggaaaagatgtaaagaagtagagttttatattgattttagtttaagattgttataattgtattgttatatataatattatagtaattataaagaaatatatataaaatatatataaaagaaaatgagaaggtagttaaaatatattattagaaaaaaatcgattaaatgaaaaatgattaaaaataaaagaaggttggaatgaaggagatgaaggataaaatagttataagatatgtataaaattaatattataattatagaagtaaatttttttttattagtaattattttaaatgtaaatgtaaatggattaaattttttaattagaatttagagattattataatggatagaataaaaaggatttggttgggtacggtggtttatatttttaattttagtattttgggagacggtggttggtagattataaggttaggagttcgagattagtttggttaatatgatgaaatttcgtttttattaaaaatagaaaaaaattagtcgggtgtagtggtaggtgtttgtaattttagttataagggaggttaaggtaggagaattgttggaatcggggaggtagaggttttagtgagttaagatcgtattattgtattttagtttgggtaatagagtgagatttcgttttaaaaaaaaaaaaaaaagatttttattttggatttaacgatatatagaagttgaaattggaaagatagagaaggatatttataaaaatagtaattaagaatttttaatgattttttatagggttttatgtgttggttgggtttagatgatggtttgggagtgttatatggtttagggattgaagtggaaggaattagacgtaggtaggatggttaatagtagtgtttagattgatatagttatatttttgttatattttattgggtaacgtagatattagatttgtttatgtttaaggagtggagagaatttattttttgatgagggagtggtgggttaaattaaagaaaagtaagtgcgatggaagatatttagatatttttgtagttttttttggaaaatatatgtaatttaaaatattttatttgttagaaaggaagaatattattacgttttatttttttagtttaagttttgtgattttatagtattttggggaaggattatgttttaggaagtaggtggggagtcgaagttttaaataaagttttatttatatttataattttattttattttgatgaaattttgtgttatttttgatgaaatgggggtttataaatttttttttagggatttttttagtggcggggacgatatgtttttttttttatagttttattttatagataagtggaattagattttagttttagttatttaaaatattagagatttggatgtatgtatgttataaaaaggtgaaagaatgttttttgttattttttttttttttatttattgcgttttgaataagaatttgttttattttgattttttgaatgaggaggagggtcgtatttttgtttaatttttaattttttagagataaattttttgtttaaatagtatggtttattataaagattaaattttatattaagagttttttttttatttattatggtagaaattgaattttatggaaaggtttagaaaattttggtttaaaatgattagcgttatgttttttttattaaaataaagttaatatatttattataatatggggtattgataaggatattaaaatgattattaaaaaaatttgataaatatgttttttttattatattaatttttttttttttttaaatataaagaaaataagtttgtatagtaggagaagttgtttttttgggagagtattttttttttagttgaaaatttggtattggaattattagaatggaataagggtttttggtatgatatagtattaggttttggggtagttagagttagggagggtttattttttgggtgatattaatttttggttttttatttttttgtttttattgtaagaataaaattttagagtattagagttaaagaaatttattttattttattttttagaaaatgtaattttaaggataattagattgttatgggttaaattgtatttttttaaaattggtatgttgatgttttaatttttagtatttgagagagtgattgtatttggagaggttttaaggaggttattaaggtaaaatgaggttatgtgagtgtgttttaatttaatgtgattagtgtttttataaaaagagaagattagatatagatagatacggaggaatgattatgtgaagatagagagagaatatatttataagttaaggaaagaattttagaagaaattagtattgttaatattatgattttgaatttttagtttttagaattgtgagataatgaatttttgttgtttaagttatttagtgtgtggtattttgttatggtagttttagtaaattaaaataaatatattatattgtttaatggagagttttatttgattttattttggttttaatttgattaaggtttatatgttttgggatttttttagttttttatgagaaatgataaagaatgttatgtttagtttttggggtttttgatggtagtaagaggtagtttttaatcgagggagttttggggtgacgaaggttttatagattttattattgttgggttatttggttttagttttttgattataatggatttatgggtttggatttatttttgatattcgtgttttttttttttataagtggtttttggtagagatggagggaaaggatatagggatttaaaattttgattattttagtgttttttttttatttttatttagagataatacggttatttttttaaatttttgaggacgtggttaatataagtaatggagtacggggaggtgttttgaatagagttgtatggaagggtggttggtggtttttagattttttgtttatacgtgttgggtttttttagtatgaaatgttttagagatagttatattttatgtttggatttttaaattaaaatgtgtgagggttttagttttggttaattgagtattgaatttaagagagattaggaaattttttgaatattgggatattttatttttgaattttgaattttggaagttggtttttggttagggaggtaggtgttattatatttgggttgtttttgtgaggttttttttttttttgttttttatatttttttatttttgttaaaattttagaatagatagaaatattttgtttttttagatgttttttgttataaattttaatgttatttgattgaattaataaatgaaagtaattttaatataagatgaggtttaaagaatggtatttgatatgggtttagaatgaataaatggattaagtaatgaattttgagaaaatttatgtaaaatttatttttaattattttattaatttgattgtggaattaataaatgattttaaattaatataaaaaagtgtaattataaatgtatgaatgtttagaagtgtgaatgaggggtaatgtatataagaaaaaaggtgtgtataggaagaaattttttattttacgtttttattgatttttttggttaagatgggttaaaagtttaaaaatttgttttttttatatggttaaatgatttagtataaaatataattgattgaatataattattaatgttttaaatatattagaaaaaattaataaggaaaaataattttattattattaagattttaagttataataaaataaagtttagaaacgtatcgtttgtttttaattttaatgattataggattgtagtgtttggtttttaaaagattatttaaaataatttagggaagtttttttaataaattttatagtaggattatagttaaatttatgagtagtagtagaagtaaataatgatattgtttttaaaattttattttgaaaaatatgtttgaaagtggttgattggtttttaatttaattattattatttgaagttatatgttagattggtaaagtcgtcgtaatttttatgtattttatttttgtaatgtaagtgttttattttgttatttgataaaagaaaatattaagttaggtatggtgatgtatgttttgtagttttagttatttaagagtttgaggtaggaggtttttttagtttaggagtttaaggttgtagtaagttatgatggtgttattgtattttagtttgggtaatagataatgtaattttaatgtaaaattttagtgttaggagtttaattttggattgattttgtgagattttatttgagagaagttgttgtgtataatgaagtttggggaatattaataagaagtaaatgtttattttgtttttaatttataaattaaaaggaaattttataaaatttaatgttaagttaaattattgtagaatgaatgataaaaaaattattttataaaatataattagttgttagatatatttgaatattaattagaaaaaagatgaatgaaagttatgttttaggaataaaaattataaaagaattgtaaaagtttattatgtttttggttggagttacgtaaagttattatttattcgtaaattgggattagtatggtggttattttttaaagttgatataaggattaaatgtgttttaatgtattaaaagtatttagaaaagtgtttgagatatagtaagtgttaaagtttttttaagtaaataaaaaatatataaaagtgatgttaaatttacgattttgattttttgtgtatatttaatgtgtttaaaattttgtttatttttttttttatatttatagtgaaatgtttttgattaatttaatgggttgtgtgaggtgtttattattttttatattaaatttggtatattgtataatatttttatattgtgataatttattaagttaatataggtttattttgtttttaattttttttatatatagtatagaattatattgttatatttttaaattttagatgatttgaaaaatatttatattatagtagttaaatagtaataattataagtaatttggataaaatatttgaaattagagaattatatttagaataaattttttattttatagaaaaattttttattgaaaatttttttatttcgtatataaataagaatttagtatgtttttttatatttagagagaatagagataaatagggttttttcgtgtggtttgggtattttattagatgttgagtttaagaaagttttatttttgaagaagttgaaattttattttttttcgaaatggggtttttttaaagttagtaataatgaagttgttatttatacgatgtatggttgaataaaaagatagagatagcgggtgttgtattttatttttgtaatgttgttttgtttataagatattatttatatttaaattaattaaaattatattaattttaaaagttagtttttttagttttttatttgtattagttatattttaaatatttagaatttatgggtggtcggtgattgacgtaatgaatagtatagatataggtattttattattatagaagggagttggatagtagtgtgttaatgttttaaggatagaattttgagtagaattataggatgatgataatttcgagtttttattttaatttatggttttttttttgatgagtggtgtagggggaaatttattttttttgtgagtaaaggttaatttttttaattatagataaataattaatattattttttttaaaattagttttatattgttaagttataattaaaagtgaagggtttgaattatatttatattttaatatatggttttaaagggaagattcgtgtgaaaaagaaataaaatttagaaaaaaaatttagaagtttttatattaatttttatagtaataataattttttttttgtcgttagagtttatttttattttgattttatagtaattttgtttatgtttttttttaaagttttattttatgtatatatttttaaaataatataggttattttaaattttatataaattttgaattttttatataaatggaattatgttgtgtatatttttataagattttattttagattaaatgtatgtttgttaagtttttataggtgtttgtagagtatttatgtttattatttgtaatattttattgaataaatatattatatattaaattaatttttttttcgtttatggttattttatttgttgttagattttttaaaattataagtaatgttgttataagttttttagtattagtttgttggtataatgggtatatatttgttaaaattatatatttaggagtggagttattggtatatgtgtatgatattttatttaaagagatgatgttatattgttagataaagtggttgtggtaagtaatgtgtggtagattttgatggtttgtatttttattagtgtttggaaaatttaataattttaatatagaaattttagtgtattttttaaaatattttattatgttttttttattaaattttattgagatataaattatatattatttatttatttaaagtatgtaatttaatggttttttatatatttagagttttaaatttgtatatttaattttagaatatttttattattttaagataatttacggttttataatatgtttttttatataatgaagtaaatttataaattttgagtttttattttaggagtgttttttttattattggtaatttttttagtttgataggtatttttttaagtatttttaataattttatttttaatagagattttatttagtaattagatttggagagtattgataaattttgttatattgagatttataatttatgaatatgtaatgtttatttattaaatatttttaaataaagtattgttggttttatttgtgtattttttagtagatttattttaaagattttgaaatatggtgttagtgtttatagtatttttttttttgttgaattttagtgttggttgtggtatgtataaatataaataattttatatagttttaatttaatgattttgtttaaagtttttattaatttatgtagttgatatattttgttgtttgattgtattagttaggaaatttagtgtgattttgagtgtaatggagagggtaggtttgttggtattttttttgtgtatttttgatttatattttatgtattttttttgtttcgtgttttggatattgtgttgtatggtttgttggattataaaaggtagttttgttttttggtttttatttgggatcggttaaatgggagtattattacggagagagtgatgaggagtattggttggagggatttttttttatagtttttagtattgatatagggagaaatgagatgtgattggtttggatttattaatatgggatttttatttagtattttagattaaatgtgttattttgaatatttaagagtgatgttaatagttagttaggttagttaattaaaattcgaatttaattgtggtttagtatagtgttttttaaatttgattgagttttttattacgtgggagattttaaatagttttaggtttagattaatatgtaaaattaatgaaatttaatttattaaaagtaggattttggaaatagtattgtttttaaaattttttaggtttgattttaattaatagttaagttaaaaattagtagtttaaagtagtggtttttaatatttggtatgtattaaaattatttgggaattgtagtaaaattatataggtttagatattattttaatttaataggttagagttttgagtttattaaaataaattatttttttagattttgttatatgtaatagtttgtgaaaattattagtttatattaatagaatttttattataggtatattgtagaggaaagtgtttgaatatagtttagaaagacggaaaagtgggaatgtatttattatgtgtaatttatttaatattttttaattatatttttcgggagggttgagaggatgttttttttattaaggtattaaggtgttatatgatatatataggtataaaaattgttaggtttgttgagtagttattaattttgagttttggatatttagaaatttttatttagtagttatattaaagttagttgatatgttagagttttttaaataagtagaaggttggtgtttttgagaaaggattttataatttattttgagataaattttttttataggatttttttagaggaatatttagttatttatcgttgtttattggggaatggaaaattttaaataatttgggagtttaattttaatgtttttaattttgttaaagattattttggggttaatattttgttgtaatttgtataaaaatttttttttatattaaagtaatgaagatattttattatattattgtaaagagatgagtataattatatttttttataagagatgagtataattgtatttttttagatagataattaattgttgttaaattattttttaaatcgtttttttttatttattgatttgtaatgttgtttttgttttatatacgtttagggttttttattttgtttttaagttttagtttattattttgttttaatatttcgatttttttaattaaaataattttaatataagttttaatatttgttaaggaaattttttttgtttattatttttatttagagtgttatagttatttttttttttttatattttaatataaggtttaaaattggtttattatgtgttgtaaaaatgtttgataaatatttgattgagatgtgtttgagtttttagagtattgtaggaaattaatgttattattatattgaattatttaagttaggattttggtaaattgatttagttaatttattgttttttttaattattgttttttattattatttagtagggttttttaaatattttaattgatattttgtatagaatttgttaggtttagttttagaagtttatatgtacgtatttttgttgaattaattttttaaaatttttattttatatttgtgtaaaatagttttataattttttttatttattaagtaaaaatattttattaattttcggattacgaggttaggagattaagattattttggttaatatggtgaaattttatttttattaaaaatataaaaaattagtcgggtatggtggcgggcgtttgtaattttagttattcgggaggttgaggtaggagaatggtttaagtaaatttgggaggcggagtttgtagtgagtcgagatttcgttattgtattttagtttgggcgatagagcgagatttcgttttaaaaaaaaaaaaaaaaaaaaaaaaatatatatatatatatatatatatatatttatatatatatgtattttattaattttaagagtgttttaattatttgtattttttgtatttagtatattattatttgtaaattataagagttttgtgttttttttttaaatttttttaagtatatttttttttttttttatgatattgggaagatttttaattataatttttaataagagtagtgaaaattgttggattatttaaataaaaattgagttgttatttttgagaattgattgtgttgtttttatggattagttttttgggatttattttaattttagggatttatagtgttatatatgtattcgtagtttttagatgtagattttatttatttagtttttaaaggttttagatattgtttagagtagttaatattatttaggataaaagtaattttgtagtttaatttgtttttttagatttttgtttttttttggtttttggtttggtaaatttttattgtttggttagtttttttatattttttattagattttttaaatatgtattttttttttatttgtttagtagtatttaatgggagggatgatttaaattatataattaataattgttgaaaattaaagtataatgtataatttttatgttaatgttatatgttaagggagaaaatgtataggtattagtagtgattatttaagtatgtgtaatttagaggtaataaaaataaaaatgttaggtaatatttatttattttagattaaaatttatattaataaatttaaatttttaggaaaaatatttgtatatgtaatatatgattgtgatttcgatagacgaacgtgggaatatagtatgaagatattttttatcgtttttattttgtgaggtagttagtgtgaaatgagaattagggatttaaaatgtgttgtaagattatgaaaagtattagagtaagttttatataaataaagtaatttttttataaattatattgggtttatttgtgagatgtatgtttttattaaaatggagttaattttaggtaggtgattttgtttaaataaaatggattttgatttattagttattggtttattatcggtttttttttttattaaaagggaggttttatattgagttagtattttttaagaggaggttttttgttgatattaatttttaatagggtaaatttttatgggaatttaaagagaagaggaagattttaagaaaaagggtttaaagaaatgataagaatgataatattttatatttttattgtgttatgtgttaaatagtggttttcgtattttaaaaatgttaatttattttattttgattatatatttatggtttgtgtttgttattttttttttttatagttaatgttataggaatgaagattatataaaagtagggatggagtcgggtttgtatttagataattttgttttagggttatgtttatattattgtatttttttagaatgtgagggtgggcggagagtttagtttagggagagagattggagtgagagaagaaggagagggggtcgattggattattgtgatggtttggatttacgattttaggagagaaagataaggattatgttatttagggaaaatatttaaagtttttggtttaaatttaagtatttttagttttaggataggtggttggtgggaagataaattaagttaaagttatagttttgaagattttttttttttgagaattttgtaggggtttttttgattttatggttattttttatttttggtttttgttttttttttaggattgataagggcgtttagatgggacgtttttattagttggtttcgggttttagagaagttattagagttagtggaggatgagttttataaagtgggagatttttaggattttttttggattttaagatatttagagaagtcggattttgtgtttcggaattttttttttgtttttttgtgggttttgattttagggagaattgggttggtgagaagattaggatgaattgggttggggaggtaagagggaaagggcggtttggagggtttagtagtttttttcgcggcgttttcgtttcgggttgggatttgtagattttttaggttattttttttagagtcgtcgttttaagttatttttttttggttttcgtttttttgttttttttttagttttttttatatagtaagaagtttttaagtgagcggtttcggtgtcgggcgggacgtgggagggaggttgtgttttcgcggggaggtagggcgacggcgtttaggagagaggcgagcggggcggcgttttaggtattttgcgtttttttcgttcgtaatgtgcgggttttcggagtttaggttcgtatttcgggtatttgaaggtcgtcgggtttcgtttttattacgtgggttttgagttttttcgcggcgttttcgtgggcgatacgcgatttttgagtttttatagtcgcggcgagaattagagcgtgaagcgcgggtggagaagatggtatagggttgtgggcgttttgaggaaagttttcgaagatcgtagggaatgtgttattgaggggtttgaggtttttgggttcgtattattattagggttagtcggtgagtgattttagatttcgggtataggtgtgtttcgtttcgattttagagtgattagttcggtttttttagggatgggggggcggggttttagttgattttttttaggtggggaagcgttggggttattttgttttaggttttttttttaatttggattatgattgatttgttttgtgattaatgatagagggaggaaggagttggggtgggcggggcgattttttttttttttttggtttcgttttcggtttattttggggtaggtttagggtatcgtatttgtagatgttgttgtttggttgggtggtggtttcggataggagttttttcgaaggatattttaagttcgtttacgataaggagattttatgtttttgaacgaggatttgtagatttggatagcggtttaaagagcggtttggaggatttattatatttgggagaggttttggatcgcggaggttataagggaagtttcgatgggttattgtattaggtggttgtttagatatttggagtatggtaaggagatgatgttgtcggtaggtattggggttttttaggttttacgttaggattttttggagttggaattatgttttttggaggtatttatatttgaggaaagaggagatcgaatagttttcgttttttttttttttttttttttttttttcgtcgtcgtttttttttttttttttttattgcggggttggggattttggtttaggtttttgaggtttttttatgggtgggtggggagggaggatagagaagaaggagtgtagggaggtaaataggaaaggatagtagttatttttgttaatagtgaggtatttgggtttagttttatcgggaattttttttttttttggttttttgtgtttaataattatatataatttttaatttaattagaagataaaatattaggaaacggaatcggtagagatatagtagatgaaagtattacgaaggattgttaggttttaatagaaagtagtagatgtgagtattaaaagttataaatttttttgtaaattagaaaagaaatagatttttttttttttttttttttttttttttttttttttttgagacggagtttttttttgttatttaggttggagtgtagtggcgcgattttagtttattgtaagtttcgttttttaggtttacgttatttttttgttttagtttttcgagtagttgggattataggcgttcgttattacgttcggttaattttttgtatttttagtagagacggggttttattgtgttagttaggatggtttcgattttttgattttatgattcgttcgtttcggttttttagagtgttgggattataggcgtgagttatcgcgtttggtcgaaaaagatattttaagattgaaaagtggtattattaatgttagaattaaaaaattggatttgagggtgtattattcgagggggttaagttaaattttgtttttgttttttttagagtttcgtggagatttttgttgtgtagtaaagtttgggaggggtttttggttgtggaaggtaggttgagacgttataggtgagataggaggaaggggatttgttggattttcggaggtttggtatttagggaaggttagtttttagggttgtttttggattttagaattttgatgttaagttagattttttcgtttttttatgagtttttaggagtagggttatatggggtttagaaagttttatagtgtttaggaagtgggtttgttttttgtgggataaaaatttttaggttttttttttttagatttttaaattttttaaaagagattgaattggaattatttaggttttaaattgaattaaggaattgggattgtgtaatgtgtgtgtgtttgtttgtgtatatgtggatgtataaataggtatgggtatttatgtgtatgtgcgtgtttataagtgcgtatatgtatgtatttgtatatatttatgtatataagtaggtatgggtatgtatgtgtgtatgtgtgtgtgttattttgtgatttttttatatttggtattattttggtttttttttggttgttttttatattataggttgtaggggatagaatagcgttttatttgtaggtatagaacgggggttaggataagtgttggggagagttggttttattatatttggaataaggaaataggatttaaatggatgggttttatttttttatagaattgtattttaaaaaaagtgttagttacgtttttaagggatttatatgaattaaattatttaaattttataagagttttatgatttagagatagttattagttttattttatagataaggaaattgaggttattaggaagtttagtaattgttaatgggttgatttatgattttaaggagatagtttgattgttgagtttaagtaattgttttgttatatttatttttatatttatttattattggttttttgtgggttatttttttttgtgggttttgattagttttttttttttttttaggtatagagattggattgaagtttattgtatttgttatagtttcgattggggagttatggggttgaagtgatttataggttgatggagtgtgtttgttggatgcgggggaaagggagatttatatttgttttggagggagttaatggtgtttgtattatggtatatgaggtgtattatttagaatgttgaagggtaaagattagtaggggttatgtagagtttatttattacggttttattttatagtttgtatgggtttgagagtggtggggtgtttatttatttttatttaatttttattggtttttgatttttttttttttaattggtaatatttgtatttaaggttgaattatgaggaggagtttatttatattttatatttttttttttttgtttgttattttttagtggggttttttggatggtgtgagaggagagtgacggagatagtaagagaatttgatatttatattggtaaagagaaagtgggatgttaatttatgagaaagataagggttgttatagggaaggggatgagataagttttaattggttttaagggtcgtttaatttagtgaaagttgtgggaggtgtttttagttatttattgttatgtaagaaattgttataaatttagtagtttataataatatatatgtattattttatatttttatgggttaggaatttagatatagttatgtagtttttttatatgatttttattagagtgttatggttgggttttatttggaggttgaattggggaaggatttatttttaagtttaagtaattgttggtaggatttatttttttatgtttgttagattgatagttttagttttttattggttggtggttagaggttgattttagttttttgttatatgggtttttttgttttattaaaatttgtaaataaagaaggtagaagatagagttatttagtaatatagaagtgcggttgtaatatgattttattacggaagtgatattatttttgttattttttattggttagaagtaagtttaggttttatcggtttttagttggatgagatgttaagagataggattatcgggtattattttagggtttttatatataggttggattatgattgaataagattattataaattcgggttttggattgggttagatgatttgtagagttgagttgtgtttatgaaatcgaatttttggaaataaaaattaagagacgtttattggaaaggttggttttgtattttgtgtgaaagttaagatggcgttttttttaaatgtttttttttattattttttaaattttttgtatttgtaaagaagtagtattattaaatttatttggttttttttttattcgagtgttatattgttaggtaaattttttgtttttattatttttttaagtttgtttttatgtagaattttacgaatttttggtaattatattttattgatttttttttttttatttagtttattttttagtgattttattttttttgtatggataaattagtttatttaattagggaatttgtgttttttaaagaaatatttttattattttttggattatatgggttaagatttttttgttaagttttagtttattttttatatggatacgataaaattattgggggttttggaaagtcggggattggtatagtttttaagtaggattagatatgtaagttataaagatatgaggtagatatttttgatttttttatgattttgatgatagtatatttggtatttaatatttgtttgtagaggtgaatttaattaaatttttttttgattatttaatattatgtgagtttaaggattttttatgttatgggttaaatttttttgttttatgttatttttttagatggagtgttgtttatatggggatttttttttttttttattttattttttatgtgtgaaatattgggttttgattatttagattttttagggttttttttatttttttttttattttaatattttttttatagtttttgttagggttttttcgaatttttttttttttatgtatttagtttagtattttttagtttattttttatattttattaaagtgatattttggaatgtagatttgattaaggttttttttgattttagtgttgttagtgttgtatattgttttcggataaaagttaaaggttttttttaattttataagttttagttattgaatttgtttattgttttaagtttgttttttgtttttgtgtttttttttttttaatttttattttgaattgttgatagtttttttagattttttgtgtgtttttttttttgagtttttgtttgtgatattgattttttaaaagattttttttgttatttatttggattaattgtgttttttatttagttttttgtttagatattgtatttttttggaagtagttttttcgtattaattatagtagtttgtatttagttgtttttttagtttttttgtggaatttttgatgttttatttattgaggtttaggagattttgatatatagtaattgtttaataaatgtttgttaaataaatgtggggtttattatgagatattacgttatatatgtaagaatggtattaatttggttgggcgcggtggtttaagtttgtaattttagtattttgggaggttaaagtaggtagattacgagattaggagatcgaaattattttggttaatacggtgaaattttgtttttattagaaatataaaaaattatttgggcgtggtggtatgtatttgtagttttagttattcgggaggttgaggtaggagaattgttggaatttgggaggtggaggttgtagggaattaagattatattattgtattttagtttgggagatagagtgagattttgttttaaaaaaaaaaaaatggtattaattaaaaagttaaaaaataatagatgttggtatggatggattatattgttggttgtgagaatgtaaattagtataattattatggaaaatagtatggagattttttaaagaattaaaattagatttattatttgatttagtaattttattattgggtatttatttaaaggaaaataagttattatatgaaaaagatatatgtatacgtatgtttatagtaatataatttataattgtagggatgtggaattagtttaagtgtttattgattaattagtggttaaagaaagtgtggtgtatgtatattatggattattatttagttataaaaaggaatgaaataatgttttatgtagtaatttggatggagttggaggttattattttaagtggagtaatttaggaatggaaaaattaaatattgaatgtttttatttataaatgagagttaagttatgaggatataaaaatatataaaatgatataatggattttaggggtttgttggtggaggttgggaatagggtgagggataaaaggtaatattgggtatagagtatattgttcgggtgatggtgtattaaaattttagaatttattattaaagaatttatatatataattaaaaattatttgttttttaaaaattattgaaataaaaaaattttttagataaatgtggggttgatttgtaatttaaaatttattttgaatagttaatataagaataatatttaaaagattataataataaaaatgtgtatagtgtgtaaagtaaatttcgttttttattttatttataatttttttaaattttttgtttggatgtaattattgttattagttttagtaagaaattaagatagaaattaaagttttgttttttataataattacgattaattatttttgtttatatagtaattttttttttttttaatagttttttagtatgaggaatttaaattgaataggtaataaatatatttttaaacgtaatgtaatttgtattttgttttatggtaggaatttttttttttgggattttaaatttttagattagttgagtacgttgaggggatgggaagtattaatattttacgcgggttatcggaagtgttggtgagtatagttatttttttttttagtattggtggttagagatttatttattttatttgttggagatttggtattatgtaatagttgttgttatagtttaagtgtatgttttattttgaaggatattatttattttgataggatgtgatttttaagataaaatttagttgtatttttaagagattattttattgttttattagttggtagcgtgtgtgatgtagtatggggtagaattaggagattttatggtcgtgtgtttattattagatagcgttcgttataaagtaggttttttagtttggggtaatgttatgtggtttttttattagaagattatatatatgtgagtttttagataacgtttttgagtgtggtattatgggaagaaagaataaatttatatcgttaatataaggtaagttaaatttgatagaatttttgttttttttattgtgaaaaagtaagagtagaattaatttgttattaaattgtttattggtttttataagtaaaggtaatttgttggagtttatttatcgttggaaggtaggttgtgataataattacgttagttatgttgaagggagtttaagttttgggatttatttatagtgtattttttttattatagatattgtttttaagagtttgttttatgagtattgggatggttaaggatagaggttggttgatgtgtattaaatgatttattttgtatatttggttgtttagattatttgtatagagggtaatttttgttgagtattaatatttgatataaaagatttaagtattttgtatttattgtatgtttttttttagatatttttgtttttgatttttttattttgttttttttaggtttcggattcgttatttaagttatttgtcgttgtttatgagtttgtgtatgtttttattttaggttatttttgtttatataaagtgggtaaattagagttttatttgtttattggtaggattttttttagtattgtttttgtttatttttgagttgtttatattgtagatatattttattgttgttttatattaatatattaagttggtatgtttatgaagaagtttagaattttttttttaagttagttggttatagaaattatttataaggttattggtgagagtcgaggttaaggtaaatttttagtagtgtgaggtgatatggggtttgagtaatgtttgtatgtaattaatattagtatttagaatatatatattttaatttaggggttagttagtggttttagtaaaggtttagatggtttttttttgttgtgtgtgtgtttattttttttttcgaagttatgtgtaattttatagggattataggggtttttattaattatagttagttatatttataaaagttttgatttttgttagtagatgggagagggtggtttggaggattgaaatttttattttataggattttggatatttatatagttgtttttttttgtgtttttatatgaattttagtattgtatttaggatatcgtttgtatttttattttttatgtaattttgtttgttttttagatggtcgttttttttttgaagtttaatagtggttattacgtatttgggttgagggttattggttaattttgtgggattttgggattagtttttttttatttttagttatttttgtgttttataaaatttagttttataattatatttatttttttttgtgtgtatttttaagaaattattgataaaatatttgagttttttgaaattataaaaatatatataagaaaatgtttatggggttattgattagtatggaaaagtataaatttttttgttttttgttttttattagaatttaattttttaaaattgaatttattttaaatttttggtttaattaggagttgttgtagttagtttattttagatagtattttgtaagtttttgggattggtagatataagattattttttttatttatatatgtggttttgttttggttagattaacggatttttagtgttttttttgagttatattgaggtaaattatttagattacgaatttatatttttaaataaataaaatagtagtatagttaataatttatttattttattattgggtatatatttaaaggattataaattattttattataaagatatatgtatatatatgtttattgtagtattatttgtaatagtaaagatttggaattaatttaaatgtttattaatgatagattggataaagaaaatgtggtatatatatattatggaatgttatgtagttataaaaaagaatgagtttatgtgttttgtagagatatggatgaagttggaaataattatttttagtaaattaatatagaaatagaaaattaaatatcgtatgtttttatttataagtaggagttgaataatgagaatatgtggatataaggagggaaatattatatattggggtttgttaggggatgggggtaaggggagggatattattaggagaaatatttaatgtatgcggggtttaaaatttagatgacgggttgatggatgtagtaaattataatggtatatgtgtatttatataattaatttgtatattttgtatatatattttagaatttaaaagtataattaaaaaaagaatttattttatttgtgtagtttattaaattttttgtatattttttaaatttgtattttttatagtttttgatatatttttgttttaataaatagtttgttaaaattattaaattttatagatatattaatggtttgtattatttaatggtatattgtttgttaaattgaggttagttagtttttttttatttattgttagtaatttatgtgttgtattgttaaaaatttagtattattttattttttttttagtattttttttgtagaggagaagttaggtattatattttttaggatttttttttttgtatagttttagtttatattttttagtgagagagatttgtttaagaaatggggttttggagagatggtgggatagatttgtatttattagtggtggttgtaggtagaggagtaggtagatgttaggtttttagtggtttttttgttaggttagagatttatttgttttgtttgtgtggattaagatgagtgataagagtttttttataggttttggagaatatagtaatttcgtagtaggattttgagaattttttatttatgttttaagttgaagtttttagtatatgtttttttgatttttttattgtagtttttaggagttttaatggtgattggtattattatagtattttgttgttgttataataaattattataattatgtggtttaaaataatattaatgtatttttttatagttttggaggtaagaagttaaaaatgtgttattatgggttaaaattaatatgtcgttagagttgtattttttttgaggttttaaaggaaaatttgtttttttattttttttagttttttggggttgtttgtattttttggtttgtggtttttttttttattttttaagttagtagttatattattttgatttttgattttgttgttatagttttaattttgatgttgttttttattttttttatttataaggattattgtgattatatcgaatttgtttagataatttaggataatttttttattttaagagttttagtttaattatatttgaaaatttttttttgttttattaggagatatttttataagttttagggattaggatatagatatatttaggagattgttattttgtttgttatatgattttattaatatttgttattcgtggtttttaaatattagtgtatgtttttatttttatttatttttgaaatattagagtgagtttgtttttttgaaaatagtttattaatgtttagaggagtttaaaaattttttgtttgttgttttaaagtttttaaattgtattgattttttaacgtgtatggttgtaaattaggtaataattttgttggggtgttggaaggaaaagaaagggaatgattagatagtttttttgattcgggatagaatttgattcgggatattgtttttgatggttggttattttgggttgtaatttagttttttttttacgtagattcggttatttttgattttttaagaggtttttatagtatttatgtttattttttttattagttatttttttgttttatatttttatgtttatatttttttttttttttattattgtagttttgttttgattttttagttattgttttttttttgtatgtatgtgttttagttagttttttaggaagatattttagatagtttattattatttgttattatgtttatttgattgtagagttttgaagatttgtaattttttattttttaaattttagtgtaaaaataatttttgtttatagtaggaaatgaaataattaaaatatgtataaatatatttttaaatttttttttttattaaatttaaatttatttaattaaggtgattattattgtattagtttattttttgtatgtttattttttttatttgtacgtaaattatagtgagtgtttttatttggtagtttttgttgagttgtaatgattataagttttatatgtaatttaattatttttagggtaatttgagatataatttaaatagtataaaattcgtatatttaaaatatataatttagtggtttttagaatatttatagttgtgtttttattattataattaattatagatttttttatttttttttagttttgtagaaaaatttatatttaaattttagttttaagaaattattaatttatgttttaattttatagatttatttattttgaatattttatgtaatgaaattatataatatgtggttttttgtgtttgtttttttttatttatcggaatatttttaaagtttgtgtgggtcgtagtttgtattagtattttatattttttttatcgttgaattatattttattgtatggatatattataatttatttattagttggtgatattttggttttttttatttggattgtgattaataatgttgttataaatatggtatataggtttttatgtgaatttatgtttttattttttttgggtatattgtattataggaggggattgttgggttatgtaataatttaatgtttataaatttgagttattgttagtttgttttttaaaggggttatgttttttaaatttttattagtaaagtgtgagtattttagtatttttatatttttattaatattaattattatttttttaattatagttattttagtgggtgggaaatagtattttatttttgggttgatgtgtatttttttgatgtttaatgatgttgaatatgtttttatgtgtttatgggttttttgtatattatttgttttattattattattatttattgtttattattattttattattaatattattatattgagttataattattttttatatattttagatataagttttttttttgttagatataagatttgtaaaattttttttttatttaatgagtttttttttatttttttgatggtgtttttagatttatatatttttaattttgatgatgtttaatttattttttattttttttttttgtttgtgtttttggtattatttaagattaggtatttttatttaatttaaagttatgaagatttatgtttatgtttttttttaagagttttttaatattaagttttatatttaggtttttgatatattgaggtaatttttatatgtggtgtgaagtagggatttagttttatttttttgtatagggatagtttgttgtttttgtattgtttgatgaaaagataattttttttttttattgaattatattagtattgttttataaaattaattaattatataagtgaagagtattgttgggtttttaatttttttttgattttattgtttttaatgttattgtaagttggatttttaaataatatttgtattaatgtattgatattttatagaagtatatttaatttttgtattttgattttgtagtttattaatgtgttaaattaatttagtattagtggtttagtagttgttaagtttgtttttagtgaattttttcgtatttttatataagattttattatttgtaattgagatagttttattttttgttttttaatttagatgatttttattttattttattgtttattgtagtttttgaaaaattatattgtatttatagtgttttattatttgatatttttatttttattatattatgaatattttttgaattttatagaaaaaatggtttaatttattattttaatgttgttttatagtatgttatatgtatttatttttttggggtaaatatttaggtggttttatttatttgttatttattttatagatgtttatatgtatatatttttttagttattttagagttttttgattttttataacgttagtgattaaatttttgatttgtttgattagttagatatgttgattgattgatagttttattgttattttgtataatttaagattaatagttatatttggattttagattatttaggtttagttgtagttagttttttttagttttagagattttttttttgtttgttaatttttttatttttgaaattgtttttgtattttagtttaagtagttttttagtttagtagttttggatttgttatttgttaattagaaggtgttatttgtagaaggtaagtaaggtatttatttttatttattttatatttagttattaaatttttatgtagtttaggtagatcgagttgaaaatatttttgtgtttagtaatatagttattgagtatattattattgttttttttatattttagttttatttaaagattaaagtgatagttttttagttatgataaaaaagtataaaatattttgagggatttgtaaattataaagttaaaatattagtttttgtatgtaatatatatgttaaattttatgtttaatatttttttcgtttttagaattaattttgtaaatttgaagattgagttttttatgaattgattggtatttgttatgtttattagattatttttatttgattgagaggatggtggtagtaagagttttttttttttagaggtttttaaaaatatttattgggaagaatgtattatataaggtatttaattaatgaaattatagatataattattggtaaaaaaattaaataaatatttttttaattgttttgtatttggtatatttttttttttttgttaaggaagtattttttttttttttattttatagattggaattttttaaatttttagttttaataagataaattgtattttgaaattattgtttttttagaatattcggagtgttattatgattttagaagatgtttttaattaagatttataatttgattgtaagaaatttttagataaggtattgggaatttttgtaaaattgtagttgggttgtgattagagaatttttataatattaacgaattttataaaagagttgttgatttaataggtttttagagattttgtgtgggaattagaaggtattttgtgaaaaacgataataagaataattataataataataatggttgtatttaaaaggtttttgttatattttaggtattggtttttgtatttatatggattattttgtttaatatttattataattatatgagaaggatgttattatttataataaataaatgaaatttgtaaattgtaatttgtttaagaaaattaggtatagagatgttaagttatttgtttaaagttttataattttgaagatatgaggttagaatttagttttaggttattttatattagatttattaatttagttattgtatgattgtattaagattgatttaaagttatttttttttttttaataggtttttttatgatagtgagtataaaatatagggttaatgacgtattgggtgtagagaggggttggaaagaatgtggtattttagattatgtttattatgtttaaaaattataatttcgtggtgattagagtttattttaaatttttttttttggtattttattgtatttagttgagagagtattttagttttttatattttagaatatgtagatttgttcgtggttttgaaagatatattggtaggtttcgttaattatatgaatggtatttatattgtggaaaattgtttattagtaaaaatgtatagttgaatttgtatatttattatttataaggttggagaacgtgaagtattggataatttaataatagtttggaaagatattataaaaagattcgtagaatatttttttatatgtattatattgaaatgtataaaataaaattagaatgggatatattatgagtgagaagtttattttgaaattttaattagaatatgaagaaaagaaatttaatattagatttggaaaaagataaaataatttgtattttatttaataatatttatagatttttaatatatatattatttttttaaattttaatttatatttaattatttatttatttttattttttgtttgttttttttttttattttatattttttatttgggatatttttttgtgattaaagtatattttttagaattttttgtattttattaggtgtgtttgtgttaaattgtttgtttttaaaatttattgagatttaaattttattattatatttttatgtttaagtgttatgtgtttgtttttttaaatttttttgaagattatttatagttttatagttattaaatgtatttaataatttgttttttaattatagtttatttagtaattttatattttatataattattttgattttttagttatatgattgtatgattttgttgtttgttgtatttttttgtttttttacggtgttttgttttttatgaatattgttttttgttgttgtttttaattgttaagtgttttttttgttggtgtaatgattttttggaatttttagagtgttaatgatagtagaaattttttagagaagttttgtttgattttttaaggttttttggagtttgtattattttaaaataaatttatgttttgatgatttttagattatttagggagtgtgaattcgggttgtaaatttatttttttttaattttaggagaaggttttgtttttttttatttagtattaaggtgattttttggggagatttttaagtaaggatgttttttttatattgaggagttggttttgggattttggtgaaatgaggagaatattttattaaattttttattttgagtgttatttgaattttgttttttattttaaatgttttaggaggttatgaaaattaaattttaattattttatattaagtaaataagtttagtaaaaaaagtaaatgtataatttcgtgatttaggatttgataatttttattaaagtttaagttttttaatgtttttatattgtgttttatttttttattatttatttttgttagtatgagggtaggtatgtttatttaaatgtgttatgtgagtggtttaaattttttttttaacgttttttattataaattttattattttatttttttaaagttattgattatttaaggaaattattagttattgttgtgtattgattaggatttaatagtaagacgtttttttttttggtaaattgtatttttagatggtttaattgaatatttttttattggaagtatttttatttttattatttttaatgatgatttttgaaagagattttaatgttttgatagttaattttggggtatttaagtatatttaaatttttttttttttatagttagttgtttttagggaattttttaagattttaataatgagataagggagagtggattttttagtggtaataagaatattaggagtatagtataaattattaggtaatttatttggttttatggaatttgttaaagtttgatgttgtgtatattatttttttttgtagattgagggttggtgagtatgagtgattcgataaaatttaggttataatgggtattttaagttatttggttattttttgtattatgattatagaatttagaatttattagggtttagtagtaagttagaagttattatttaaatttagaaaaagaatggaattttttttttaaattttgaaatttgggtaatgagttttatgattgttatatataaatatatatatatatatatatatatatatatatatatatatatttaataatatttaaataagtatttagggttaaatggtagatatgtttgatttttgtttggattaaaatgatatttttatttattatggaatgtttttgtatttgtattagtttataggattttggattagagaaatatttttgtaggatatgaagttatatttttttattggtgaaattatttgtttttattagagtttaataatattatgtagttattttttaaagagtttgtattttttagatttgttggaattttttaagttaaaaagattagggttttaataatgggaggttttattgttaatagttataatcggttgtagaatttattaaaaatatgtgagtgtattgtttggggaaagaattaagaataaaagtagtgtttgttttgtattttattgaattatttttatggtttttatttaattttagttgtagttttggtgatttgatttatagattgtcggaaagttatgagttatggaatgtgttttttttaatattaaagaggttagttatatatatgtagggtgtttttttttattattgtaggttgtatgaagttagtgatttttatagaattttggggttatagatgttaggtttaatttttttttattatttatttaatttttatttttttaaataatggttttatttttttgtttaggttggagtttaatggtgcgaatataatttattgtagtttcgatcgttttaggtttaggtgatttttttattttagttttttaagtagtcgggattatagttgtgtgttatcgtatttggttaatttttgtgttttttgtagagatgggtttttgttatgttatttaggtttgttttgaatttttgggtttaagtaatttatttattttggttttttaaagttgtggtattatagatatgagttattgtatttagttttaattttattttaattttagaaatttaatttgatagtttttggtgtttggatttatatttgttttagaagattgaattgtggattgtgatttttttttttaaaagttttttttagggtagaatttttggttatggtaatatgaagagatagattagtaagtttttttttaatagtaatatgaaaattgtattaaatattaaaaataaatatttgaagttattggaaaattaataaaggtaagtaatatgtgataagagtttttttgtttaagattttttttgttttaggtaaggattgtaagttggtggttttttttttttatttatgagtgttttttagttttttagtagataattgtagttttagtggtttaatatgggtagtttatagagtttagagtttaaattagttagaaatgtaaatgagaatgttgaaagagagttgtagaagagttgagattaataatgtgaatgtaaattatgtttatttttagttgaatattaaattttgtatgggtgtgggttatttgggaatttggtgaaaaattagaaagaaattagagggaggtttattttttaaagagataaatgattttggtaagatttgtaagtttttagtaatatggattgagtgtatttgttaatttgtatagagtttagtagaagaaagtaaaaattttattggtttgagaggtgaaaaggtaggatttgagtttaataaaataattggaaatttaaagagaattttagaaataaagtaattataatgaagttgaattataaaatttgagtataaatgatttaaatatttggttaatttttaaattatatagatgtaggatatatatttagaaatttttgttgaaattacgtaagatattaagtggaaatttttaaatagaaaaaaaagaaaatgaaagtattttggaagaggtttatagaagttttgagatggtagaataaagaataagtttgtgattttgaatataaatttttagaatgtgtttaattttaaaatttaaaatatagattgaaataagattaaagaaaaaaatgaagagaacgttatgaatttattagagaatataaagtaggtgattagatatgtaagtggatttttaaaagaagatataggattagaaaaaaatatttgagaaaataatagttgaaagttttttatatttggtgggggattttagtttatatttaaggtgtttaataaatgaaagtaaaataattgtagagaaaattataaatagggtgattaaggttttggtttggtttgaggtaatttagttagttttagggatgtgtgttttggtgtggagtaagattagggagttattagtgtaatttttgtttttatattagcgggattgattattttaattttgattgtagttattgttggtatttgaattaaagtggtgatgttttttgaggaaatttttgaagttattagttaattagaatattataagttatgtttttcgtgaagaggagtatttaattttagtatttgtattagggaattttgtttgaagggattattagtgatttgaaagtgtaattaataataattttgttattattacgtattagttaagtaatttgaatatatatgttgaagatatatttggtgagttatttaaggaggttaattatttttatattagattaaatttttttagaatttgttgttttatggttaaagttatttagttggatttagtagtggaagaggtgttattataggatattaatatggaaaaagtttttaaaagttttttagtttaagattagtaagtagttttaaagagtagtatttttatttttgttgttgatatttataattagagtgattgattattttttttgaatagtatgagagtatatggagatgataaagataggttgaagttttatattgattttttttatttatttgatttttggaaagaagaagtgttgtaggatatagaagataaaaggaaagatagaaggtattaaaagtagtaaaattatatagatggtattatttatgatgtgaaaaggattataaaagttagaaataagtattatgagtggaatatgatggtatatgataaagagtttagatttagtaataggttgttttagtgtgtattatggagtattttgtaagaatttttgtttttagatagtaggttttatataatggatgttagggatgtttttatcgagttattttaaattatttttacgattttttttaggtagttgaagatgtatgtttatatgggtttataaattaggtttttgagtttgagtgttattttttttttgttttagtgaggtatatggttttaaatggattttaagagcggtttttatttttttgttttattttagttgtgttttaattttgtgtatttatggttttaggagattataggatgtttttagtataggtgtttgtatattataattcgttaagatttttttttttttttttttttatagtataaattgtttttgttgttttttgtaaatttttttgtcgtttttttttttatattagttggttttatatatttttttttttattttttttttattggtttttgggtttagtatttttttttttagttatatattttttttattaggttttttggtttagttttttttttttgttttttttatgtattcgtttttatattattattagtagttgaggtaaagtgttaagaatttgtatagttattaaaaagtgatacgagaagtgatttttttgttgttattggaatggggatttgattggaaaaggtgtaggatttgtgtgagtaagaggttaagagtgagttttttgggaaggataaggttataattttgttaatatattgtagtggagaagtatagggattttgagggagatttagagtttgataaaaataatcggtttaattaaggtagtgttggggttagttttatgtaataggtgggtagttggtattaggttgggtgatagttaggagattatatgttaagaatgtatttaagattttaagtggttttagtatttaatggtattataatttcgtagttgagtattttttgtattaatgatgtgatattgtttttgtatatttaaaaattttgggtttttttagtatttattgtgtaatatttaaatgttattaagtatagaatattatgttgtatatgaagaaatagggtgtaattattatatcgttttgaaaagagcgtttttttttttttttgtaggttatgaaagtatttagtgtattttgggtttatttttattgattattataattttgtagatgtgttgtgtgaagttgtttggtgttaggtttttgaagattaataattgtgttttaggtggatatttttagatgagtaattgatattgttttattgttttggggtgttttatgagtttgaaaagttgttggttttagagggaaaggtttaataaataaggagaatttaatatttttgtttttatttttttggcgtggtattttttgtgtgaatttgaatgtttagttgaatagttttattgttttagtatatatttgttaaatgtaaagttggaaggattttttttaggaagggttttttgtgaatatttatttagtaaatgtttgtggatgatttttgtaagaggttttagtgtttagaagtaatgaaaatgaagaataagatttttttatttttaggggtttttgggattaatatttaaaatatttgttagtttttatagtttgggtattagttagtaggagtagaggtgagtggtttaggagttgggtagttttgggtagagtagttgtatgtgggttttgggtgttaaagtaggtttgtttattgtgtgttttggaagagttgtgttttaaaggaggttataggagtttttagttttttagtgtgtgatagatagtgttttagagggtatcgtgttttatttggttttaattttgaaagtttatattgaggtgaaagtagatattgatagttgtttattttttatgtgttgtgtttagattacggatgaatttatgagtagggtttttgttttattttagaaatacgtggttatttttttttatgttgttgttggtatattatatattgataagtattttttaagattattttgatagattcgtagttgtagaagagtatttagtttttatttttgtttttttttttatttttgtattgtggttatgttagagatttatggggtttatttttttggttaaggtaaattgttgggaaatgtaagaatgagagtttttattgtgtaattttggatgaagaataattgtttgtttagagtaaataaatgttttaggttttgattatagttatgattttaaaaatatgttaagattatttatttattgaggaaattttatttatttatagtattttaaattgattgtagttattagtgatttttagttacgatgaagggaagaattttgagttaaacgtagggttgtttgaggtgatgataggagtggaaataggatggtaattaatggatttaggttaatgagttttgagaaaattaattagtttttgtaagttatagttttgtgtttttaagtggatatttgtttgttttgaggtagttattatataatacgtattatatagattttagttatatggattttgaaattttggaaattatatgtttgtagtttttttttatgattatgtttgtgttggtttatttgatttttttagttgtattagttgttgtggtatgagttttttgagtttttttttttagagttgattattatttggcggttgtcgttataatttttttgaatataagtaaatattatttataaatttttaaatttttttgtttaatttttttttttttttttttttttaatgtagaggtttattttgcgggtatttttgggttttatttagttataaattattttttttattttagagtagttatttttgatttttaatatagatgagttttgttaggtttagttgaatggtattatatagttattattatgattttgggttttattatttcgttgtgtgtggtcgtagtttatttatttttatggttgtttaatgttttattttataaataatttatattttttgtttttttattgttgatagataattttgttgtatatagattttataaatcgtgttgttatgaataatatttttatatagtttggtatatatatatatgtatttttattggtttagaattaagagtgttattgttggattataggtgagtagatgattggtttagttttttaaaaattaagtttttagtagtaaataaatagtagaggagggtgaattttttatttagaaattatttagataataaatgaagaaggaatgagagattgagattataataatttttttgtaatttattatgaattaatagatttagttattgaatagtaatggtaattaataatataataaaagaaaaaattaatgtgaggtttttttttttgatggaagaatataatatagtattattaaataagtttaagtgaaaaagaaattaagtttgaatagaagttgatttttatagttaattattaatttagaggtaatatagataatagaaatatatattaaattatgttttggggagtaattagtaaaatgtatattatgggaagttttattatataatataaattttaaggaagaatttatagaataaagaaaataaaagtatatttttaaaggtaaaattaaattataatattggatgataaaaataaaaataaaataaagaattgatgatcgtaaaagttaggttgtgtttttatttgagggaagaaagagtttattgttgggttggagtaaatgatggggtttttggtttgttttataaatatttatttttggtgattaatgggtgtttattttgtattaaaggatataaattttagatattttttttttttggagttttatattttattttatgatataaaggttaatgaaaaaataatttatagagtatggttattgttttgtataaagttttttttttatttttttttttggatattgagtatttagaataattagtagttttaggatttttagtaggggtgattttatttttaggtgtgtatgtagtttatattattagaggtaatatgtaggtttattttttgatttttggaagaatttgataggatatagttgaagggaagtttttttcgttatttgtaggtttttggttattagtgtagagggagcgggtttttatttttttataggcgtttttatggttatagttttttttttgtatggggagtaaggtttggtttttcgtttgaatacggtgatagggatttcgttaaaggtggagattatattattttttttttagtaattttacgttttttttgttttataggaaagttgatttaggttggtgtttagtaaagaaattttaaggagaggtcgggtgcggtggtttacgtttgtaattttaggattttgggaggtcgaggtgggtagattacgaggttaggagattgagattattttggttaatatggtgaaatttcgtttttattaaaaaatataaaatattagtcgggcgtggtggtgggtatttgttgttttagttattcgggaggttgagttagaatggcgtgaattcgggaggcggagtttgtagtgtttttgtttttaggaggtagatgtttaggatgagttttaaggtggagagaggaatgttattgtttattttttaggttttaagtaagaatttttttgtttagtttatttcgatttttttgaatttttaacgttaatgaggattgttttttttttatttttttagattgggttttttaatattggaaagtggatgtgatttttagttttagtatgttttggtttattgtgttgttagtaaaataaaattaaaatatatattgaataaataataaataatttatagtgagtaaaggtttataatgtatttttttgagttaagattttattttggtttgggttggagtttagtggtgggatcgtagtttaatgtagttttgtatttatgagtttaagggatttttttattttagtttttataatatttggaaatataagcgtttattattaggtttagtcgtttattgatttttattttttttagagacgagggttttattatgttgtttaagttggtttttaatttttgattttaagtaatttttttgttttagtattttgaattgttgggattataggcgtgagttgttatgtttagtttgtaatgtattgatattattaaggtttttttttttaagtgtggatatagtagtagatattttttgttttttgggtgaggatattgggtaaagtggaatagtaaggtaataaagttattgtagaaagtatttacgtggaagaggtttagtagggagagttatttgttttagggatattatatttagggataatttttttttttgggtaggattgttttttgattatttttgtatttataatagttttgaaatcgtagaatgatgagatttaagattggttagggttttatttttgtttagtttttattttgttttgttttgttttttttaaaaaattattatgagatttgttaattttttgaatggtttttgtgttttaattttttttagaatttaattttttttaatattttatagtttatttttagttaaaaatgtattagtatttataaatagagaaattttgtaattatttattttttataaaatgtttatttttatggtatagatattatatgtaatatatttatataggttataagttttataagaaaaaaatttttttttatttttaaatagttttatgtatataaattagagtaaatgaggggaataagatagttttttgtatttagtttagtatttattatttttgattatttttattttttttgataattttattttttatttggtattatttgtttttagtttgaagaattttttttattaattgttattgtgtagatttgttggtgataaatttttttaatttttttttatttgaaatatttttttattttgtttgtttttgaaggatatttgtgttggatatagaatttttagttgtttttttttttttttagtattttaaaggtgttattttatttttttttgtttttatggtttttaataagaagtcgttggttaggataagaggaatagagaaattaaaattgaggaaataatatggtagatttaaaatttattaataatgaaaaaaaaatttatatgaattaatattttaatgaagggtagagattgtgtgaattggttaaaaaaaaaaaataaaatatagaatttaattatatgttttttttagatatgtagtttttttgttttttttttttttaatttaatttttatttttagttaaggagtatatgtataggtttgttatataggtaaatttgtgttatgcggttttattgtatagattatttttgtatttattagtatttatttaagtattaagttttagtatttattagttattttttttgattttttttttttttttattttttatttttaagtggattttagtgtgtgttgtttttttttgcgtgtttatgtgtttttattatataatttttatttataagtgagaatatgtggtaattggttttttgtttttgttttagtttgttaaggataatggtttttaattttatttatgtttttgtaaaggatatgattttatttttttttatggttgtatagtattttgtggtgtatatgtgttatattttttttttttttttttttttaatggaaaataatttttattgagattttattagttgtaatatttgtttttagtattaagttttttttttttttgtaattcggttttttttgagtggttttatgaatgttttttttttttttatggtttggaagtggttatggttaaatttggagggggtgttaatgaatttaaggttaattttttttagagttcgttgttttgtttgtattagtaaggatttgcggagggtgagtatttattttttggtttttattatatagttttttagtatgataaagttattggttattttattatagtggacgaagttatttaaagggttgatgtttttgttagataggttatagttagtggaggtattgtttttgattagtttgttatttttgataaggtagttttagttaattttatagatttttttgttgattttagtgcggtgatggtagtttttttgtttattacgtattatagagaagtttatacgagtaggatgttatgttttaatataggttattttgtataggttttggtgggttttgcggggtagttttttggtgtgttaacgattggtgatttttttgtagtttttgtttttggttattttgatgacgtcgattattttattttgtttaaatatttggtttataggtatttggtgtttgagtttttcgttagtttagtttagttttttagttatagtgtttttatttatttggatttttattaggtgggtttttttttggtatagaggaagtagttgtatttgggtgtgggtaatgacgtagatgatttggtagtatttttttatgttgttgaagtttttttttagttgttttttgttatttttattttgttattttttgtagtatttggtaaaggttttttttttagatttatgttagtttttatagaaacgttttttgtatttattattgatgtgtttagcgaagatagttttgtaagttcggaagttttgaggggtttttacgtagtttataatgtttattggtggtttttttataatggttatagtttttattattttttttttgtttattttggattttggtttgtcgatttttcgtacgatgtgggttatgttagttttgtattttaggaaggttgtgaggtggatcggtttggacgggttatttttagggaagttttttatttttttataatgtttgttgttgcgtttttaaggtaggaagtcgagggatttatgtttgggagtggagaattttttgtgagatattacgttattaaattttgtcggtagagtatatttgttatattttttttatttagtttattattgatggatatttaggttgattttatgtttttgttattgtgaatagtgttgtaatgaatatatgtatatatgtaagatatgggttttttttttttaatttgttttgttttattttattttaggttttaggatatatgtgtagaatttgtaggtttgttatatacgtatagtttgttatggtggtttgttgtatttattgatttattttttaagttttcgttttttgttttttatattttttaaaaggttttgatatgtgttgtttttttttttgtatttatgtgttgttattgtttagtttttatttaggaatgagaatatgaggtgttttgttttttgttttcgtgttagtttgttgaggatgatgatttttagttttatttatgtttttgtaaaggatatgaatttatttttttttttggttgtgtattattttatggtggtatgtattatattttttttatttatttattattgatggatatttgggttggttttaagtttttgttattgtaaatagtgttgtagtaaatatacgtgtgtatgtgtttttatagtagaatgatttatatttttttgggtagatatttaaggggttaaatagtatttttggttttaggtttttgaggaatggttatattgttttttataatggttgaattagtttatatttttaataatagtgtaaaagtgtttttatttttttatagttttattagtatttattgttttttgattttttaataattattattttgattggcgggagatggtattttattgtggttttgatttatatttttttaatgagtagtgatattgagtttttttaattttttttattaagattttaatgttttattttaaaaaattaaaggaagtttttatttattttttaagataaagatttagcgtatttaaatgtttttaaagttaatagaaaaatagttttgttttgttatttttttaagaaagtattgtagttatttaaaatatgtttaaagaaaaaaatgtaattttttgagttttaagttttacgaaaggattatatgttaaattatgtatatcgatttgatgtgtaagtatgtaataaatatgtatatatatatttttatttgttttatattattttagagtatttatagtatatgaagatgggatttagaaatgtgaaaaggttgtaatagtgaaaaggaaaaaaagggtataaaggtttttagattagtagaataataatgtttagttagttaattattttaattttggagtagattaaaaaagttgttttgaaataaatggtatttgtaagtgatgtttattgtaatatttgttaagtgttatttgttattattgataggaattatatagtgttagtaatatagtttttattgttttagaatttttttaaatggttagttattgttattattattttgataagtattttaagaattgtgttgttgagttttttaaaagataattagtttataatttatgtttttttatgtgtttatattagttatttatggttttaaagaagtataaaagaggatataagttgttgaagattttatagaagaaatagagatattagaaattttatgattattaaatttaaattatcgttgttttgttgtatttttatagtaggttgtgtaatggtttttatttagtttatcgtagtgatttgaaatagaaaataaattatagttttttaaattgttttttggattaataatatattgtgataaggtaagattttttaacgggaagtttatagatgtttgtaatttttgtttttatttgttattgtaggaaaaatgttttagatgtattaaaagtataggtggtaatttttagattttttttttaagaatttcgtcgagttttgtaaagattgtagtaaaatttgttattatttatgagttttttttttttagaaaataatttaaggtaattttataatgtatatttatttgtggatgttattagtagagataaatatatgaaggttttaagtgttttagattttttgtgacgggtgaggtattgtattgtagatttgaattgattttgaaaaagtgtaataataatagatttatagagtcgtttgtgtttttgttaggtatgttttgtagttttaaagttattgagatgattattatttttttttttatatgtttttcgattattagttttatttagatttttacggagattatttattaggaatagaaaaaatttttgtgaattttgattgtattttgtaaattggtaattgatttttttaatggtgattttaaggttttttggattgatatatttatattgttttgtttacggggtttttatgattatattaaatttttttgttattttatttttatgtttttaataaatttgatttgttaatattatttgataatagtttcggttgaaataattagttaaatgtggagtattatataggtattgtaatattgagtttatataataagtattttttaagttacgaagtttagtaagagttggtttagaatttttaaaaataggattgagtttttaaatttgagaagtagaaagttttgagattttagttttagggtagtatgttggtttgtttttttgattaattgttggagttattgttggtttttttttgaatagtttgggttatatttggggaggagtaagagtattttagtttggaaggttttttattttgtttagtaggaatttgtggtttgtttttatgagttggaggggtggaaggaggtgtagatgaaggagttatttttagtgggtatatatgaatagtgttagtggtgaatgataataatgaaacgttttagtgattggattaagaaatttggtttagtttgaaggtagttttggtattattttttttatttttttatttcgtgttattatcgaaggttttcgttgagttttattttttttagtattatttgtattttttttaaaagtttttgtttttagaattttagtttttggttgttttttaattttaaaaggtttgtttgaatttgaattttttgtcgtagatgtatgggatatattttttgttgattttttttgtatttttggggttgaatattttttttttttgttttttatagatttttcggtattagaggttttatgattatttttattttgtttttttatttttgttatttttttgtttttttttgttgagatttttttatttatttttttggtttgtttacgtttttttttttttatttttttttttgttttttgttgtttttgtgtaattttattttttttagttttttgtttttttttggttttttgttcgtgtttttttttttttagtttttttttgttttttttgttgttttttttgaagtttttttttttgtttgtttttttttattagaagagtagtttttgtatgaatatgagttttttttttatttgttaatatgagagttggagaggaaattattggtttggcggaataattaggaataatttttttattttgaggagattgttgtttatgatttgtatttttagatttgattatatgttttttaggtaatttgattgttagttttttagtatgattaatttgtggaatattttttatgttaggtattggttgaatgatgggtgaaatattagatttagaagtagtaattgatttaattggaattgatatatttagtggttttgtttttttattttgattattattatttatttgattatttattaattttatgtttttatttatttttataggtggaggtggtatttcggtagtaggtttagaaggaattgatttttttaatgagggataagtaaaatttaatgagatagataattttttattttggtgttgtgggggtggagtgattttagtatttgttgtatattgggaatagtaaaggaattagtttttatagtttttttttaaaattaaagtttaaggtttattgtataggatagttttatttttttatttgaaaagtgtattttttagatgttagagagttgttttaatttgtaaattttttgtagaattaaattagttaagaagtattatatattttatattttttttttttttttatgtgtttatagaattatttgggaggtgtgttttaatttaattagtagtgattattggattgatggtttttttaggaatattgagagaatgtaaaatataggaattttgataattttgtattttttgagtatttattataattaagttgatgtttttatttattattattgtgtatagtttttttgttgtgattgtttttttttttttggttttatattttttattttttttattattgtttttttgggttttgtttttggaatttaatataatttttaaagaatttttagttaacgtgttgttattttttttttttgttttttgttttttttgttgtagttattgtgtttttttttgtttgtttttttttttaagttttttttagattttaatttttttatattttagtttaaggtttttagagagtcgtttagtttttttagtggtttttttgatgtttgtaggtttaagtattgaatggaagtaatattgttgttgtttgaaattagtttttttttggataggattataaatagttacgttttatatacgtgtgtgagtttttttttatatgttttttggttacgtaaatgtttttttttgagaagtgtttgtttatattttttgtttattttttgatggggatgggttttttttttgtaaatttgtttaagttttttgtaaataaatatgtgagtttttattatttttgtttaaatatttaatagttattttaattagtgtaataaggattaggtatggtggtttatgtttgtaatttttgtattttgggaggttgaggtgggaggattatttgagattaggagtttgagattagtttgataagtgagattttatttttattaaataataataattttaaaagaaaaaagattaatggataagaaaggaagaaatgaaagtttttttttgttattagttttattgtatatgtagaaaatattagggaattttgaaaaagtttttggaattaattattgaatttgtaaaatagtttataaaatatatgtaataagtcgtttagatgaatatgaaaagatagtaaataatattagttattaaagaagtgtaagttaaaattataatgagaaattattatatattatttagagtagataaagttaaaaagatatatgataagttttaatattggtaagaatatggaaaaaataggaatgtttgatattgttggtaggaatgtaaaaaatgtggtagttaatttgtaaagcggtatggtaattttttatatagttatttatttattattatatggtttagtaattttataaatacgtatttatttaaaagaaataaaaatgtaagtttatatttgtaagtagttatttatagtggttttattaataataagttttaattggaggaatttatatgtttattaattggagatatagaaattaatgaataaattgggattttagtaatattcggtagttgtttagtaataaaaatgaatgaatggtattattttaaatatcgttatgttaagggagagattaaataaaagattatataatatatgattgtatgtttatgaaattttagaaatgttattattgtagtgatagaaagtatagtagtggttgaatgaagggaaggggtgagggtgggaggtaaggattaaatagaaagggggataaagaaagtttttagggaaaagaaattgttttttatagcgttataatttaggagtgattgggagggggaggtaaggggagaagaaggtttgagggataaggggtagagagaagggttggggaagtaggaggtgaggataaggagtaggggaaaggattttaaagtagtggaggggtttagtaggaggatttttgtatttggtgtttttttattgggtagtgtggtagttatattataaataattattaatatttattaaaaagtgtagttaaaattggtgaatttttttatacgtaaacgttttaataagtaaaaaaaaaaaaaaaaaaaaaaaaaaaaaggggggggggaggggggaggaaagaaggtaaaaataaagatattgttagattattaaatttataaaatttattttttaggggttttgtattatatgtaattttaaaggacgttttataggttgaagggaaatgatattagatggtgatttagatatatagaaaggaataattaataatagaaatgatgtatatatatatattatatatatatttatttttttaattttttgaagatacgtgattgtttgtttaaaataaaaagtattatattgtatcgttgagtttataacgtatattgatgtaatatatataataataatagtataatgatagtttaaatgaaattatattatttgaagtgttttttattttgttggatgtagtttaatattatttgaattttattgtgaaaagttaaggaattgggttttaatttttataataataaaaaattaatgtaaagaaatatagttaaaagttattaggagaattaaaattataagttaaaaaatgtttatttgatatataagaaagtagtaaaggaggaatagaaataaaaagatacgagataaattgaaaacgtatagtaaaatggtagattaaaatttaattattataagtgaagaaatgatacgatttgagttatattagtaggattgttgagtattgtggggagaatagatatgggtaggaggtgagggatagtgttagtgttataatttaggagtgatagggtggcggggattaaaggggaaagagggtgtgagggatgagaggggtagagagaagggttggagaagtaggaggtgaggaaaaggagtagaggaaagaattttaaagtagtagaagagtttggtagggggttttttgtattcggtatttaatatattttgtgtgattgttttaaaattaatgggttttttatgatttttttttaaaaaggggttataaaaatattaagtgtttaaataaaatatgtatattgtttagatgtgtatagtttacgaaaacgggtagtgttggagcgttggtgaagagtattgggattgtatggagttttcgtaattttgaggtgatgattataggttttcggttgtaatagatagtaataaattttgtttttttgtatttaggagatgttttggatttatatagggaaattttggttagagaatgaggataattttaaatgtaataatttagagttatagatttatagtttgcgaaagtaaaataggagttttgagaatttaattgtaatgtagttttgatataggttttttatagattggaattttaattatttagggattattaatattgtgttatttattgtattaataaataaaaaggaaattggtttttatgagaatttttatttggtgtttttagataaaattttattaggtttaaagagaaaatttttgattttatacgtttatttttagggcgagtttattgtttggtattaagttttttatggtgagtttttttgtataagagtttaaggggagaggtaagtgttttttattttgttggatgtagtttaatattatttgaggtgaggtaaggtaaggtaaagggtgggaggtagggagtttagtttagggacggggattttaggaggagaagtgaaggggaaggggttgggcgtagttttggggtttttttttggtttttatagatagatttttgtttaggatttaggtatatagtgtgataaagatgtttggtgtaggagaagagggattaggacgaagttttaggtttcgggcggggtttttagggttttaggttttaagggtcgtgtttgtattggggaggcgtcgcgttggggattttttatttttttgagttttattttttttaatttgcgtcgggtttttttttttgaatatttatgacgcgtttttaatttttatttttattgggtgtcgggttttagagaagttaattagcgttttcgtagtttcggttttaaagtttttagttatttattcggatttatattttttttagaggtcgagatgcgggttatggcgtttcgagttttttttttgttgttttcgggaggtttggttttgatcgagatttgggtttgtgagtgcggggttgggagggaagcggtttttgcggagaggagcgaggggttcgttcggcgagggcgtaggattcggggagtcgcgtagggaggtgggtcgggcgggttttagttttttttcgtttttaggtttttattttatgaggtatttcgatatcgtcgtgtttcggttcggtcgcggagagtttcgttttattttagtgggttacgtggacgatacgtagttcgtgcggttcgatagcgacgtcgcgagttcgagaggggagtcgcgggcgtcgtgggtggagtaggaggggtcggagtattgggatcgggagatatagaattataagcgttaggtataggttgatcgagtgagtttgcggaatttgcgcggttattataattagagcgaggacggtgagtgatttcggttcggggcgtaggttacgatttttttttattttttacggacggttcgggtcgtttcgagttttttcgtttgagatttattttaaggtggatttgcggaattcgtttagattttcgatcggagagagttttagtcgtttttattcggttttattttcggtttaggttaaaattttcgcgggttggtcggggcggggcggggttcgggggattgggttgatcgcgggggcggggttagggttttatattttttagaggatgtatggttgcgatttggggttcgacgggcgtttttttcgcgggtatgattagttcgtttacgacggtaaggattatatcgttttgaacgaggatttgcgtttttggatcgtcgcggatatcgcggtttagattatttagcgtaagttggaggcggttcgtgcggcggagtagttgagagtttatttggagggtacgtgcgtggagtggtttcgtagatatttggagaacgggaaggagacgttgtagcgcgtaggtattaggggtagtggggagttttttttattttttatagatttttcgggatggttttttacgaggaggggaggaaaatgggattagtattggaatatcgtttttttttgaatggagaatggtatgagtttttttgagttttttttgagggttttttttgttttttaggataattaagggatgaagtttttgaggaaatggaggggaagatagtttttggaatattgattaggggttttttttgattattttgattattgtagtagttgtggttaggttgttgattttttttttaggttttgttttttgttttatatttaatgtgtttgaaggtttgattttagtttttttgagttttgtagtttttatttaggttaggattagaagtcgttgttttttttttagagattagaattttttaatgaataggagattattttaggtgtttgtgtttaggttggcgtttgggttttgtgtcgttttttttattttaggtgttttgtttatttttaggatggttatatgggcgttgttggagtgttttaagagagatgtaaagtgtttgaattttttgatttttttcgttagaatttttaaagatatacgtgatttattattttttttttgattatgaggttattttgaggtgttgggttttgggtttttattttgcggagattatattgatttggtagcgggatggggaggattagatttaggatatcgagtttgtggagattaggttagtaggagatggaattttttagaagtgggtagttgtggtggtgttttttggataagagtagagatatacgtgttatatgtagtacgaggggttgtaagagttttttattttgagttggggtaaggaggggaatggggggttatattttttattagagaaagtagaagtttttttggagttttttagtcgggttagggttgaggtttgggggttagggttttttatttttttttttttttttagagttatttttttagtttattatttttattatgggtatcgttgttggtttggttgttttggttgttttagttgtttttggagttgtggttatcgttatgatgtgtaggaggaagagtttaggtagggaaggggtgaagagcggggtttgggtttttttgttttattgggagttttaagttttaggtagaagtgtgtttcgttttgttattggaagtattatttatatatgggttattttagtttgggattttgtgtgttagtatttatttttttgtgaagtatatgtgataatgaaggacggatgtattattttgatgattatggtgttggggttttgattttagtatttatgagttaggggaaggtttttgttaaggatagattttaggagggtagttggtttagaatttataattgttttttttatgttttttgattttgttttgggtttgtagtcgtagttttggaaattttttttgggtttaagattaggaggtttttttaagattatatggttttgtttttttttagtttttttatagggtattttttttttataggtggaaaaggagggagttgtttttaggttgcgtgtaagtgatggcggcgggcgtgtggaggagtttatttattttataattttttttgttttatattttttgcgggttttgattaggtttttttttttgttttattttaggtagtaatagtgtttagggttttgatgagttttttattatttgtaaaggtgagattttggggagttgaagtggtcgggggtggggtagagggaaaaggtttgggtaatggggattttttgattgggacgtttcgagtgtgtggtgggtcgtttagagtgttattatttattatgattgatttgaatttgtttatgattattgtgttttgtagtttgagatagttgtttgtgtgggattgagatgtaggatttttttatattttttttttgtgattttaagagtttttggtatttttttttgtaaaggcgtttgaatgtgtttgcgtttttgttagtataatgtgaggaggtggagagatagtttattttcgtgtttatcgtgatttttgtttttatattgatttgtgtttttttttcgattattttttttgttttagagaggtggggttggatgtttttatttttgttttaaatttatggtgtattgagttgtaattttttatttttttaatgaagttaagaatttgaatataaatttgtgtttttaaatatttgttatgaagcgttgatggattaattaaataagttaatttttagaagttgagagagtaaataaagatttgagaattttttagaatttgtatgttcgttgtgttgagtttgttgtaggtgggggtggggaaggttgtgaggagtcgagtgtggacggggtttgtgtttagttgttgtttagttttttatgggttttatgtggttagtttttagttgggttatttttattgttttattgtttttgtttttttagtggaaatttgtttagcggaagttgtgattatagaggtttatttatcgtttagggtagtttttgtatacgggagtttttgtgttttttgagataaatttttagatttatttagtttttgttttttttttagggttttttttttgttttggttttttgtttttttttttttttttgattttagtgattttcgtgttgattttaattttaatttatgaatttaaagtagagtttaatttagatttgtatttgtttgtaaaattgggtttatagtttagaattgtttttttttgaagagagaaatttgatcgtgtgttgtagtgtgcggggcggttggtgtgggaggagggataggggagggaggatatataagtagttttgttgagaaaagtataggcggtttcggtgttagtgtgaggggattttgtgttgtagttgttataaaatagtatttggtttgaggttatgttaataaagatattggttttagagtaggaggtgttttatattgattatttaattgatttttgttgttagttagatataggatagaaaagttttgtatttggggaatattattgaagtaaaattagaaaaatatttgagtatatgttttagtggtaagaggtagacgatatatatattataattatagtaagaaaagaaagtgatggaaggtggtaagtgttatgaggtaggtgattcgggtatgggtagtggggatagggaaggtggttgttggataggagttgttaatgtgtgttttgttgtaaagatgatttttgaggaaagatttgagggatatgaggatgtttggggaagttttttttaggtaaggaaattttagtttaaatgtattagggtaggaaggtgtttgtgtttttagaagagtaaggaggttaggagggttggatagagaaattagatgaggttagaggtatggttagagtaggtgggtttgaggggagtggggttgcgtttgatttcgttttgagtgggatggggagttagaggatagttttgagtagaagagagttatgatatgattttttttttaaaaggatttttgatggttgtgttgagaatagaattgagaggcgagggatgagggaggtagaagggaaaatagtaggaatcgagtgtagtattttaggttggagatgtcggttattttgattggggtgtgagtataggaaatagtgggacgtgaggggattttggatgtatttgaagatggatttatagtatttgttaatggattgtatttgtggtgtgagaaagacgaattaaggatatttatagttgtaaaatgagtgagtagaaggaagggtggagttgttgttagtggagatggggagattttggtaggagtattttgaggagggggtattataggtatttagtggaggagatgtttattaggaatgtaggtgggggagttggggtggtagttgggtagataattttatagtttaggggaaaggattgggttggagaaatagatttaggagtttatattatataaacgatatttaaaattttaagtatggatgaagtattaagggagtgattgattgtggaaaagaattagcgtaaggattgaattttggatttttagttttaagggatttgattagattatagagtagattgtatagttttggttttatgtttagaggacgtttagataaggaattttcgtgtgtattaggattatttggatgtggtgttgagatttaggaagtttggagtcgagtaagagattttggatttatgataaggttggagtttacgttgttggtttttagattatatttggagtagttagaatattaggattttacgtttgtatcggtttcgtttgtagggtttgttatgtaaatgattttttggttttgtgtataatattgtgagataggggttttgaggagtggtttgagtattttttaagtttttattagaaattttgttgtttagttagattaggaattttagagattagagagtgtttagggtgggtgggtgggtttttaaattttgtttaaaagaggattttttttgtagaaaggaaagggaggatgtatattattagttaagagatgtgataatttttgttgatttttttattatgaggtagaggttaggtagataatttaggatgtggttgttatataaggaatattttcgaatgttgttttttgattttggtttatagatttattttttatttattttttggagaaaattatggaaaataaatttttgtaatttatatataaagtagtatatttggtattgggggttaattttattgtggggaaggttatagaattaggttgaaaattatatattttagaaaagaatttatagtttacgtttttggattaggttttttttaggaataattgtttttgttgttgagtatagatattattgtttatatttttgatattttggtgttggatattggattttaaggttaggatagatgttattgttgtttttggtaattggatattattattgatatttagttatgtttattaaaatgtattttgtataattttagtttttttgtgttattttattttagtttagagtttggtagtgatataggatttaagaagaaattatttaggtaggtagtgagggtatagaagttttagtaaggttttttttttaatggaaagtaggttttaaatcgtttttttttttgataaagattagtttgtaaaattaagttttagatatagataagtaagttggaagtttgtataagtgaatgttggtagttgtgttaataggaaaaggatatttgggattaggcgtgtttatagtgatggttttatttttttttttttttgttagttatgtgtttagtaaagagtagataatatagtatcggttaataaatttattttttgtgtgttattgtttttaatttttttggtgagatataatgaattttgagtatttatttgagataataatgttgttttagtaggtggttatttgattgatggagtttaagatttatgtttattattaattgtaggggtgattggagtgttgtgtttttttagggatgggggtggtttttatttttttttaatatattatatgttgtaaatcgaaaataaattttaaatttatttttttttaattattttaatggatattttttttagttagggcgtttaaaaattaatttgaaagattggtttaggttattatgggaagtaggtgttgaatatgttttattatggttttttattttttggaatttaggaaaagttgattagtaattaatattaatatagattttaagtttgattagaaatattataatttattttttttgaagtttggtatttggaggttttaattgtatgataaaattttggattttataattttttattataatttagatatttttttttattgataataatttaattaattgttaattagaatattttaaaatttatttataatttagaagtagtaatttttaattttcgtttgttttaaattgttttgtttttttggattgaattaatgtatattttaaatatatattattagtgttttatatttttttaaaatgtataaaattaatttatattttaattatattgagtatatgtttttagggttttttgagggacgtgttatgggttgtggttattcgtatttggtttagaataaatttttttaaatattttatgaagtttgtttttttttattgatagtatggaattttgacgtagtaagagggtttaagtgttggagtgtgaagggtgggaaaagaatgataaattttaattattggagtagtgttttaagataagaaatttatttagtatttggtagggatttagagtgtttgaattaatcggtgattaataaataatatttttttatttatttttttgaaaataagttattatattaagtttttgtttattttagtttatattttagattattggagtggtatggtgtgatggtgaaatgattatttatatatttttttttggtattgttttttattgggattaaaatatttaggttttgtaagattttagaggatttggttgtatattgatgttttatattaatatttgtatttttttgtgtgtggaaatatttttggggagagaatttttgatatttattagtttttatgtgatttttttaaaggtttaaaaaattttaatttttagattagaggtagggttattttatgtttggataatgaatagttggtagaaatttgtgtttagtagatttagggatatgaaataaatgtttaatttttttttatttttttttttgggatcgaagaaggtagaggtttatttgtttatttttattgttgttgtgggaagttaaggatttcgaatgagggattggttggagttgcggtagaggaatataaattgtgaagattttattttaatatggatatttaatagtttttaaataatatttttataattttttatgtttgtttttattttaattttttaattttgttatttttataagttgaggatgtacgttattttaggattattgtgataatagtgttataatttgattgtaaaacgtgtgtttgaataatatgaaattagtgtattttgaaaaagaatagaataatagtaatttttatggaattagggaagataattataaggtttgattgtttgcgaggttgggtaaaaagagttatatttttttttttgcgtagagtttataaatagacgtgtaagtaggaaagatattattaaattttttttttagtaaggaatattaatattaatatattgaagaaggaatttatttttggggggaggtttataaacggtcgttttgggaatgtttgttttatgtagttgagataaggattgagatacgttttggttttttgtagaatttttaggtttattagggtggggaaaaattttgttttggtaaatttgtggtttgattatttttttgtttttaaattttgttttttgttgtttaagatgtttattaagataatacgtgtattgttaaatatagatttttattagtggttttgtttttgttttttgttttgtttttttagaagtatgtgatttttgttagatttttattagtagttttgttttttgtatttagaagtatgtgattttttatttattttttatttttatattttttttttttttgaaatttttaataaaaatttgttggtttgagatttaggtagatattatggttttatcgatatgtgatgttatttttggtggtttagttgtaaaatttttttttttgtattgtttttttttattttttagttggtcgatatttatggaaaatagaaagaatttatgttgaaatattgggggtgggtttttttaatatattgtaagtttttttttgtgggatggtgatggggtttttttttagttaaataattttttgattttttaatagtaattgggagttttaggatttgatttaattttgatattaattatttggagttagttttagattttataggtttaaggatttagttttataagtttgtttttattttagatgtaagttataagttatcgggttttaggttatttgtatttttgtttattatggttgtaaagttaggggttttttattttttaaggtttgggaatttttaaattaatttaaagaatttaggaagttgttataattatgtaaattaaaaaatatttgagataggtattaattaatttagaagtttattttgttaagttgaagatgtattttggaaatagagatataaattattgtagtatttgtggtttatgttttttattaagagggttttgaggattttaatatttataggagaaagagtaggtaggagaggaaaaaggaatagttaattatgtttttatcgagtgtttagtaaatttgtattttatataagataaagtaaatgttgggtagagaagttaaatatatatttgtttttaggtgagtggagggatgatttttggttttgtttttgttttttatttgtgaagataagttgttaatttatattgttagggtgaaatttaataaaattttgttttagagtaaagatgttggggtttataaggaattatttggtgagtaatttgtgagggaggttatttggggagatatatgtttttttatttttgtagttatttgtttaggaataaaagaaaggcggtttttttattatttagttattaaatttaatttgtttttttggtatagtgaatttggcgtttttaaattttattttttttttatatttagtattgtagtttattattgttatagtttaaattagtggttttaattttttggtattagggattaattttatggaagataatttttttatggattagtagaggtggtagggaatagaggggaatggattgaggatgaaattgttttattttagatgattaggtattattgttttatatggagtatgtaatttagattttttatatgtagagtttataatagggtttatgtttttatgagaatttaatttcgttattgatttgataggaggtagagtttaggtggttatgtttatgtttttttatttattagtgattttttgttgtgtggtttggtttttgttaagttaggaatttgtattagtttatagtcgggggttacggatttttggtttaaattatgttattatagtagaatatttgagattggataatttaaaacgaatagaaatttatttggtttatggttgttgaggatgggaattttaagattaaggatagtatttggtagaaagtaaaagggtaagagagggtgagaggtagggggaataagaggttaaatttatagttttaggtttttttatgattaaatttaatttattaatggaggtagagttttgatggtttaattattttttaaaggttttattttttaaaaatgttgtatttaggataaattatttaagagatgtttttttagggaaatatttaaattatagtagttataaagggtataaatgagtagttagatgaagaggtgtatagggtgtggtttgggagggttttgagtataggagtttttgtttttatggagatgaggtttattatttttttagtatatggatatacggatgtgtttagtaattgggaagttttttaaaatttaatttttagaggtttttatggaagttttattgtgtaggtaagattaattaaattaatggttattggtgattgaatttaatttttagttttttttgttttttagaggtaagggatattgttgaaatttttaattttttaattatagtttcgtgtttttggtaattagtttttattttgaagttatttaggagttttttattttatagttattttattggtatattaaagttatatttattattgaggagattgtaaatgttttggaatttgtttgttaggaaatagggaaaaagattagatatttttattgggttatagattatattttggtttttgattatattatttttttttataatatttatttattttagagataaggttttgttttgttgtttagggtagaatgtagtggtataattatagtttattgtaattttgaatttttgggtttaagtgatttttttgttttagttttttgagtaatagtattataggtatatattagtatgtttaattaattttttaaaggttttgtaggaatggggttttattattttgttttagttggttttaaatttttggttttaaataatttttttattatggttttcgaaattgatggaattataagtttgagttattgtgtttggttaattatagattttttatattagaagaattataatagtgagaagattttggtatattattagaattttttttggttatgaaaaattattttaggggagattattttaagatagttaaataggaatagttttagtttatagtttttagcgtgagcggtgtagaagacgggtgatttttgtatttttaattgaggtattgggtttattttattgggatttgttatatagtgagtgttgtttatagaatgtgagttgaagtagggtaaggtattgttttattagggaagtataagggtttagagaatttttttttttagttaagggaagttatgagagatggtatttggaaaatcgggatatttttattttaatattgtgtttttttaatagttgtagtgaatggtatattaggagattatattttatgtatggtttagtgggttttatatttatggagcgttgtttattgttagtatagtagtttaaaattgaattgggaggtgatagtgaggttgggggaggggcgtttgttattgttgaggtttgattaggtaaataaagtggtaggaagtttaaattaggtggagtttattgtagtttaataaggtttgtttgtttttgtagattttatttttgggggtagggtatagttgaataaaaggtagtagaaatttttgtagatttaaatgttttagtttgatagttttgaagagagtagtggttttgttagtatggagtttgagatttgagaacggatagagtgtttttttaagtgggtcgttgatttttgagtagtttaattgggagatattttttagtagggatcgaatgatattttatacggtcgggtgtttttttgagacgaaatttttagaggaaggattaggtagtaatatttgttgttttgtaatatttgttgttttgaagtttttgttagtgttatttaggtaaatagggtttggagtggatttttagtaaattttaatagatttgtagttgagggtttcgattgttagaatgaaaattaataaatagaaggaataatattaataaaagggatatttatattaaaattttatttgtaggttattattattaaagattaaaggtagataaaattataaagatggggagaaattagagtagaaaagttaaaaattttaaaaattagagtatttgtttttttttaaaagatcgtaatttttttttagtaatggaataaagttggatggagaatgattttgataagttgatagaagtagattttagaagattggtaataataaatttttttgagttaaaggaggatgttcgaatttatcgtaaggaagttaaaaattttgaaaaaagattagatgaatagttagttaaaataaatagtatagagaagaatttaaatgatttgatggagttgaaaattatggtatgagaattatatgacgtatgtataagttttagtaattaattcgattaagtggaagaaagggtatcggtgattgaagattaaatgaatgaaatgaagtaagtagagaagttgagagaaaaaagagtaaaaagaaatgaataaagtttttaagaaatatgggattatgtgaaaagattaaatttatatttgattggtgtatttgaaaatgatagagagaatggaattaagttggaaaatattttttaggatattatttaggagaatttttttaatttagtaaggtaggttaatatttaaattcgtgaaatatagagaacgttataaagatattttttaagaagagtaatttaaagatatataattgttagatttaataaggttgaaatgagggaaaaaatgttaagggtagttagagagaaaggttaggttatttataaagggaagtttattagattaatagtggattttttggtagaaattttataagttagaagtaagtgggggttaatatttaatatttttaaagaaaagaatttttaatttagaattttataattagttaaattaagttttataagtgaaggagaaataagagtttttatagataagtaaatgttgagaggttttgttattattaggtttgttttataagagtttttgaaggaagtattaatatggaaaggaataattagtattagttattgtaaaaatatgttaaattgtaaagattatcgatgttaggaagaaattgtattaattaacgggtaaaataattagttaatattataacgatagggttaaatttatatataataatattaattttaaatgtaaatgggttaaatgttttaattagaagatatagattggtaaattggataaagagttaagatttattagtgtgttgtatttaggaaatttattttacgtgtagagatatatataggtttaaaataaaggaatggaggaagatttattaggtaaatggaaaataaaaaaagtaggggttgtaattttagtttttgataaaatagattttaaattaataaagattaaaagagataaagaaggttattacgtaatggtaaaggaattaatttaataagaagagttaattattttaaatatatatgtatttaatataggagtatttagatttataaagtaagtttttagagaattataaaaagatttagatttttatataataataatgggagattttaatattttattgttaatattagatagattaacgagatagaaagttaataaggatatttaggatttgaatttagttttgtattaggtagatttaatagatatcgatagaattttttattttaaattaatagaaaatattttttttttagtattatattatatttattttaaaattgattatatagttggaagtaaagtattttttagtaaatgtaaaagaatagaaattataataaattgttttttagattatagtgtaattaaattagaatttaggattaagaaatttatttaaaattatttaattatatggaaattgaataatttgtttttgaatgattattgggtatataacgaaatgaaggtagaaataaagatgttttttgaaattaatgagaataaagatataatatattagaatttttgggatatatttaaagtagtgtgtagagggaaatttgtagtattaaatgtttgtaagaaaaagtaggaaagatttaaaatcgatagtttaatattataattaaaagaattggagaagtaagagtaaatatatttaaaagttagtaggagataagaaataattaagattagagtagaattgaagaagatagagatataaaaaattttttaaaaaattaatgaatttagtagttggtttttttggaaagattaataaaattgatagatcgttagtaagattaataaagaagaaaagagagaagaattaaatagatataataaaaaatgataaaggggatattattattaattttatagaaatataaattattattagagaatattataaatatttttatgtaaataatttagaaaatttagaagaaatggataaatttttggatatatatatttttttaagattaaattaggaagaagttgaatttttgaatagattaataataggttttgaaattgaggtaataattaatagtttattaattaaaaaaagtttaggattagatggatttatagttaaattttaatagaggtataaagaggagttggtattattttttttgaaaatattttaattaatagaaaaagagggaattttttttaatttattttatgaggttggtattattttgatattaaagtttggtagagatataataaaaaaaagagaattttagattaatatttttgatgaatatggatgtaaaaatttttagtaaaatattggtaaatcgaatttagtagtatattaaaaagtttatttattatgattaagtgggttttatttttgggatgtaaggttggtttaatatatataaattaataaatataatttagtatataaatagaattaaagataaaaattatatgattattttaatagatgttaaaaagatttttaataaaattttatagttttttatgttaaaaatttttaataaattaggtattgatgggacgtattttaaaataataagagttatttatgataaatttatagttaatattatattgaatgggtaaaaattggaagtattttttttgaaaattggtataagatagggatgtttttttttattatttttatttaatatagtgttggaaattttggttagggtaattagataagagaaagaaataaagggtatttaattaggaaaagaggaagttaaattgtttttgtttgtagatgatatgattggatgtttagaaaattttattattttagtttaaaatttttttaagttgataagtaattttagtaaagttttaggatataaaatttatgtgtaaaaattataagtatttttatatattaataatagataaatagagagttaaattatgagtgaatttttatttataattgttttaaagagaataaaatatttaggaatttaatttataagggatgtgaaggatttttttaaggagaattataaattattatttaacgaaataaaagaggatataaataaatggaagaatattttatgtttatgaataggaagaattaatgtcgtgaaaatggttatattgtttaaggtaatttatagatttaatgttatttttattaagttattaatgattttttttatagaattggaaaaaattattttaaagtttatatggaattaaaaaagagtttgtattgttaagataattttaagttaaaagaataaagttggaggtattacgttatttgattttaaattatattataaggttatagtaataaaaatagtatggtattggaattaaaatagagatatagattaatggaatagaatagagtttttagaaataatattatatatttataattatttgatttttgataaatttgataaaaataagaaatggggaaaggattttttatttaataaatggtgttgggaaaattggttagttatagtagaaagttgaaattggattttttttttagattttatataaaaattaatttaagatggattaaagatttaaatgttcgatttaaaattataaaaattttagaagaaaatttaggtaatattatttaggatatagatatgggtaaggattttatgattgaaatattaaaagtaatagtaataaaagttaaaattgataaatgggatttaattaaattaaagagtttttgtatagtaaaagaaattattattagagtgaataggtaatttatagaatgggagaaaatttttgtaatttatttatttgataaaggattaatatttagaatttataaagaatttaaataaatttataagaaaaaattaaataattttattaaaaagtgggtaaaggatatgaatagatattttttaaaagaagatatttatgtagttaatagatatatgaaaaaatgtttattattattggttattaaagaaatgtaaattaaaattaaaaggagatattattttatattagttagaatggtaattattaaaaagttaggaaattataggtgttggagagtatgtggagaaataggaatatttttatattgttggtgggagtgtaagttagtttaattattgtggaagatagtgtggtaattttttaaggatttagaattagaaatattatttgatttagttattttattattgggtatatatttaaaggattataaattatgttattataaatgtatatgtatgtttattgtattatttataatagaaaatatttggaattaatttaaatgtttattagtgatagattggattaagaaaatgtggtatataagtcgggtgtagtggtttatatttgtaattttagtattttgggaggttgaggtgggtggattacgaggttaggagattaagattattttgtttaatatagtgaaaattcgtttgtattaaaaatataaaaaaattagttggttatggtggcgggtgtttatagttttagttatttgggaggttgaggtaggagaatggtatgaatttaggaggtagagtttgtagtgagcgagatcgtattattgtattttagtttgggcgatagagcgagattttattttaaaaagaaaaaagaaaaaaagaaaatgtgttataaatatattatggaatattatgtagttataaaaaaggatgagtttatgttttttgtagggatgtggatgaagttggaaattattattttgagtaaattattataaggatagaaaattaaatattgtatgtttttatttataggtgggaattgaataattagaatatttgaatttagggtggggaatattatatattagggtttgttatggggtggggataggggggagggatagtattaggagaaatatttaatgtaaatgacgagttaatgggtgtagtatattaatatggtatatgtatatataggtaataaatttgtatgttgtgtatatgtattttagaatttaaagtataataaaaaaaaattatttcggtgtagttttaaaatagaagtagttttagtaatataaggttgtattcgtttaggtatttggtaaaattgagttaagagataatattattttttgtttatattttttttgagtagtttatgtaatattggattttttttattgtataatttatttatttatttatttatttttagttattatttttttttttttttatttatattaaatatttttagttatggaagggatatgaagttttgttgttgtgttgatttagattgtacggattaatattgttttagtaattgttttgtattatttattttagtttatagagggtagggttatgtagtagagaattggttggttagttgattttaggtaatatagttgtatttagtgttaattttaattttgttagatgtattgaaggtataatttatttttttagatttttaggaattattatataatggatataaaatatatttatagttttttgtttaggaataatttttgtttttggatttttatttgtatttttagttttgagattattgtattaggtatgagaaaagtaagttgaggtaaagtatagttattattttagtgtttttttattttgggaaggattgtatatagattatattagtatttttttttgatttataaggaaaagagaggatatttttatattaagtgtaagtatatttatgaaggtgtgtaagtttattttttatgtttgtttttttatttttgttttatataattaatgttttaatggaatattttaattttttatggaattttttttttgagaaggatgtttttttggaattttgagtaagcgtattttttggtgtaaagaaatgtgatttagtggtttatatggttgtagtattttttatttaagtttttagtagtattttgagtatttgtatttgagataaagtagggattttttttagaagtttgttagggttttttaatatggaaataaagaaaaatttttagtttttttaaaagaaattttaggtatttagttagttttaaaaagtaagtgagtgattttataaataagaaggtaatgatagtttaaaacgatagttaaggaagttagagttataagatgttggattttttatggaaattaaagagaatattttaatatatgtttttgagttgttttttagaaatttagatttttatttaatagatttattgataggaagattttagataaggggaaattgaggattgaattttgattattgttttttgttttaaatttttttttgaggggtttggagagagtaaagtttataggttaggtttgaatatttttttttattgtttttaattgtgtaaggaagttttgtttttttatgaattataaattagagaatttttatttttatttacgatttgtaagtttttttattaggatatttttttttttaaggttaaattagtgtgtaatttttatgtattgatttatgatgttgtttataattttgtttttttgaaatttatttttatttttaagaaattttgtttgtgagttattgaggaggttgggttttaattgtgagttggttgattttttttgtttggtattttataaataaatgtttttttttattttattataaaattttagtatggatgtttgtttttattgtttttggtgagtggattttagttttgtttggtaatatatttattagtagttgagtaatgtttagttttagggtgcgtatttattgttgttaagatttatttgttgttttttggggttattggtattagtgtaatttgttagttttgtatttttaagatttttttataaaagaatttgttatatagttatatgttatttttgtttttttttttttttttttgttaaagaaaatatttatatgtattttgtgtttgtgatgtggggaatgtaagaggaatatgttttgattttatttttttttgtattgttatagttttagtgtttatttattttatggatttaggggattattataagtaaacgtggattttttttagatgtggttttgatatttttttttggttggatttaagtgttgtttaggttaaattttaatttttggatttaagatatttttttgttttagttgttgttatagttggaattataggtgtatttggtaaatatttggagataaatgtttgtttattttaattattttttaaatttggaagggagttattttgatgggtattgatgggtattgaggggacggtgttaaattatttatgagaaattgttttcgtgatttaattatttttttgtaggttttatttttaatgttggggattttatttaatatgagattcgggtaagaataatatttattttatattaggtattaacgtgttttatattaatgaattttttaaattattatcgtgatttttataggattgtgttttatttgggtattttttttattagtaagtttttttttgtttttttgattaattatatggttaggttattagttattgtttgtaagttaataaaaattaaaatataggagttttattattgtttaatttttttattattgttgagaaatattttgtaatttagtttataagagttgttttgtttttatttttttcgattaaagcggtggatttttaaataggatgttgtttatttattttttaaatgttgtatataaattaattagttgtttgagattagttgacggatattgtagtttaaattttagcgttgtttgttgtagagttttattttgtttagagaaggttaatgttttgtttaatttatatttttaatgaattgaatgaagtttatttatattatagagattaatttattttatttaaagtttagttattttgtattaatgttatttaagaaatatttttataaattatttagaataatgtttgattatttatttgggtattgtggtttagttaagatgataaataaaattaattatgatattttttaatttaagaatattttgaggaaattagtttttgttttaataaaataaggaataaataattgtttttaaaaatttttaattaatagttaaaaagttatttttatagattgttgtttaagtttattttataattgtgggtgaaaaaaatatgtatttgttgaaaatagaaggagagaaaaatgaataagtagaaagtaaaaaaaaagatatgagaataataataaagatgatagtcgttattttattggaaataatgtaaatgagaagatagatgagtaatatttttaaagttttaaaaggaaaatattgtgaaattagattttatttttagaaaataatatttttttaaaatatatatatgtataatttaaattgataaattataatatatttatgagatgttgtgtgatgtattgatatatgtatattatgtgtaatgattaaattaaattaattaattaattaatatattatgaatatagttatcgaaaaatagattttagttatatagggagtgaaaaaggttataattagtagatttaaattataataaatgttttagttttttaggtaaaaagaaaattaagggattagttggtatagtatttagtgatgaaaagatagttttattttttttttttattgagatagagaatatagtttagggttttgggaattgtttaatttaatttattacggtggatatttgagaattttttttgggtaatcgaggttgggtgttattattttagttgttatttatttgtaaatattatttatgggtattttatttagtttattatagttattgttaatattaatgtatattttttgggattagtagttttttttgtagatattttttattttttaaattagtattatttttaggtattgtattttttttgtggtaattgtgagtgggagtttatttttgttttggtttttggtttgtttgttgttagtgtgtagaaatgttagtaatttttgtatattgattttgtattttgagaatttgttgaagttgtttattagtttaagaagtttttggattgaggttatgggtttttttagttatagaattatgttatttgtaaataggaattatttgaatttttttcgttttatttgaatatttttttttttttttttttttttttttaattttatttgtttgattgttttggttagaattttcgatattgtgttgaataggagtagtgagagaaggtatttttgttttgtgttgattttaaggagaatgtttttagttttgtttatttagtatgaagttggttgtgggtttgttatagatggtttttattgttttgaggtatattttttgaatatttagtttattgagagtttttttaaaaatatgaatagagtttgaattttattaaaagttttttttttattaattgagataattatgtagtttttgtttttagttttgtttacgtgatgaattatatttattgatttgtatatgttgaattaattttgtattttggcgatgaagtttatttgattgtggtggataaggtttttgatgtgttgtaggattcggtttgttagtattttgttggagatttttgtattaatgtttattaagaatattggtttgatgtttttttttgtttgttgttgttgtatttttgttatattttggtattaggatgatgttggtttaatagaatgagttagggaggagttttttttttttattttttgggaatagttttaataggaatggtattattttttttttgtatatttagtagaatttatttgttaattatttggttttgtatttttttttttttttttggtaggttttttattattgttttaagtttagaatttattatttttttagagattgtatttttttttggtttagttttgggggcggtgtatgtgtttaggaatttatttattttttttagattttttagtttatgcgtatagaagtgtttataatattttttggtggttttttgtatttttgtggggttagtggtaatgttttttttattgtttttgattgtgtttattggaattttttttttttttttttttattagtttagttagtggtttattttattaattttttttaaaaaattttttgaatttattgattttttaaatggttttttgtgtttttgttttttttaggagataatatttttgttaattttttttgttattttttgttttttgttagtttcgggatatgtttgttttttatttttaagtttttttaggtttgattttaggttgttgatttgagatttttttaattttttgatgtgggtatttattgttataaattttttttttaatattgttttagttgttttttagaggttttggtatattgtatttttttttttattagttttaaagaattttttgatttttatttgaattttattatttattaaaagttatttaagaataggttatttaatttttaagtaattatatggttttagtgaattttttatttttgattttgaatttgattgtattgtagtttgagagattatttgttatgattttagtttttttgtatttgttgaggagtgttttatttttgattgcgtgattgattttagagtaagtgttatgtagtaatgagaaaaatgtatattttgttgttttggggtttggagttttgtaaatatttattaggtttatttgttttagggttgaatttaggttttgaatatttttgttaattttttgttttgatgatttgtttaatattgttagtggggtattaaagtttattatttttattgtgtgaggttttaaatttttttgacggtttttaagaatttgttttataaatttgggtgtttttttattggatgtatatatatttaggatagttagatttttttattgaattgaattttttattattatgtaatgtttatttttatttttttttattttttttggtttaaagtttgtgttgttagaaattaggattgtaattttggttttttttcgttttttatttgtttggaaaatttttttttatttttttattttgtgtttatgtgtgttattgaatgtaagatgagtgtattgtaggtagtatattgataggttttggttttttatttagtttgtttttttgtgttttttaaatgtggtatttagtttatttatatttaaggttagtattgatatgtatggatttgattttgttattatggtgttagttggttattttgtagatttgtttatgtggttgttttattgcgttattggtttatgtattttagcgtgtttttgtagtggttggtaattgttttttttttttatatttagtgttttttttaggagtttttgtaatgtaggtttggtggtaatgaatttttttggtatttgtttgtttgaaaagaattttattttttttttgtttatgaagtttagtttggttggatatgaaattgtgggttggaaatttttttttttaataatgtttaatattggtttttaattttttttggtgtgtagggtttttatttggaggtttattgttagtttaatgggtttttttttgtaggtgatttggtttttttttttggttgtttttaacgtttttttttttattttaattatggagaatttgatgattgtattttggggatgatttttttatggagtaatttattagtgttttttgtatttttgaatttgaatgttggtttgtttagttaggttgggaaagtttttatggatgatattttgaagtgtgttttaaattgattttattatttttattttttttaggtatattaataatttatggatttagtttttttatataatttgatgttttttagaggttttgtttgtttttttttattttgttttttttatttttgtttttttgttttattttagaaagttggtttttaagtattgagagttttttttttatttgttttattttgttgttaatatttgtgagtgtattatgaaatttttttagtgtgttttttagttttattaggttggttttatttttttataatattggttattttgtttgttagtttttgtaatgttttattattatttttagtttttttggattgggttatattgtatttttttagtatagtgaattttttttttttttatattttgaattttatttttgtttttttagttattttagttttagtttggttttaaatttttgttggttttttgagtttttagtattgttgtgttgatttttttttattttagtgggtttatttatttttattttttgaggttgttgatttatgaatgggttttgtttttttttttttttgtttttttttttaatagtttggttatttttttgtagggttattgtagtttgttgagggtttgttttagtttttagttgttttagattttttagtaattggagatattattagtgaaagttatataatagtaaagatggtagtttgtttttttttttgggagttttgttttaggaaagtatagatttgttgttagtttaaatatatttgtaggaggtattggagattttggttgggaggttttgtttagttacgaggaataggattaggatttagaggtttattaaagggaggaatatttttttaggagatatagaaattattttattgagttggaagttaagatatttattcgggttttttagttttttatgttattgaattaatagataaaggaaggagttattgtattttttggggtgattggttttggttattagggggaaattggtttgttattatataatggtagtaaataagattatgtttgaaatataggagattttttagagtattttttagtaatattttgttttataattaaagttaataaaaattataataatttaagttaggtaggattattaatgatttatgttttttaggaatgaaggtatgagttatttaagtaggaaaagaaatttgattagttgacggatttgttgaaggtagtgggattatgggatggttagtgaaagaaagttatttatattagttgtggttagtatagtggtttatgtttataattttagtattttgggaggttgaggtaggtggattttttaagttgaggaatgtgagattaatttgggtaatatgttgaaattttatttttattgaaaatatatataaaaaattagttagatttggtggtgtgtttgtagttttagttatttaggaggttgaggtagaaggattatttgtgtttaggaggtggagtttgtagtgagttaaggtaatgttattgtattttagtttgggtaatagaataagattttgtattaaataaataaataagtaaataaataaataaataattagttgtaattatgtgattagttgtagaaataaagatagtaaatgttataagtattttttttttatgtttttataatgatatttatgtttgtgtgtatgtatttatatatgtattaagtaaatatttttgtttttattttttttttattattttgtaataaaatataaaatgtgttaataatagtttttttttattaatgatggtttaattttttttaaatatggtgtttaggttatagtatatcgaagagaaaaatgtttattatgtattgagtttgaatttttttttgaggaaatggttagtgtttttagatggatgtaagatagttgtattatttttagtaaaagtatgattttataattgtttttatttggagattaagtatggtttaagaaaacgttaatgggtgttaagtttataagtatggattagggtggtgggtattatgtgttaattttattaaattatagtgtttagttatttaattaaatattaatttatatgttgttatgatggtgttttgtatttgtggttaaaattttatgttagttgattttatgaaaaagaaattatttttaaaaatgtgggcgggattttttgaattagttgaaggtttttgggtaaagtgtgaggttttttaaagaagaaaaaattttgttttaagatgatagtagtaattatagtttagatttttaatttgttagtttggtttataaattttagattgaagattgtaatattgtgattttttagtttgttagtttgtagaggagtaatttgtgatattaataatgtaaaatgaggggtggaaaaagatgtaaagaagtagagttttatattggttttaatttaaaattgttatagttgtattgttatgtgtaatattatagtaattataaagaaaatatatataaaatatatataaaagaaagtgagaaggtaattaaaatatattattagaaaaaaatcgattaaatataaaggaaggttggaatgaggaagataagggacgaaatagttataagatatgtataaaattattataattatagaggtaagtttttttttattagtaattattttaaatgtaatggattaaattttttaattagaattgagattattataatggatataataaaaagattttaattatatgttggttataagatatttattttggatttaaggacgtatataagttgaaaatgaaaggatggaaaaggatatttttgaaaatagtaattaagaatttttaatgattttttatagggttttatgtgttggttgggtttagatgatggttttggagtttaatatggtttagggattgaagtggaaggaattagatgtaggtaggatggttaatagtagtgtttagaattgatataattacgtttttgttttattttattggttaacgtagatattagatttgtttatgtttaaggggatggaaagaatttattttttgatgagggagtggtggattaaattaaagaaaataaagtgtgatggaagatatttttgtagtcgtttttggaaaatatatataatttaaaatattttatcggttagaaaggaagaatattattacgttttatttttttagtttaagttttgtgattttgtagtattttggggaaggattatgttttaggaagtagatgcggagttaaagttttaaataaaattttatttatagttataattttattttattttgatgaaattttgtgttattttcgataaaatgggggtttataaatttttttttagggatttttttagtggcggggatgatatgtttttttttttatagttttattttatagataagtggatttaggttttagttttagttatttaaaatattagagatttggatgtatgtatgttataaaaaggtgaaagaatgttttgttatttttttttttttcgtttattgcgttttgaataagaatttgttttattttgattttttgaatggggaggagggtcgtatttttgattaagttttatgtttttagagataaatttgttattttaaaagtatagtttattataaagattaaattttatattaagagttttttttttatttattagggtagaaattgaattttatggaaaggtttagagaaattgtggtttaaaatgtttagtgttatgttttttttgttaaaatgaagttaatatgtttattataatatggggtattgataaggatattaaaatgattattataaaaattttataaatatattttttttattatattaatttttttgttttataaatataaagaaaataagtttgtatagtaggagaagttttttttttgggagagaattttttttttaatgaaaaagttggagttagaattattagaatggagtaaatttttaggaatgatatagtattgcgttttggggtagttagagttagggagggtttattttttgcgtgatattaatttttggttgttttttttttttgtttttattgtaagaataaaattttagagtattaagagatagagttaagttaaagagatttattttgttttattttttagaaaacgtaatttcggttaggagcggtagttggcgtttgtaattttagtattttgggaggtcgaggtgaatagattatttaaggttaggagtatgagattagtttggttaatatggtgaaattttatttttattaaaaatataaaaattagttgggcgtggtggtaggtatttgtaattttagttattcgggaagttgagataggagaaatgtttgaatttgggaagcggaggttgtagtgagtcgagatcgtgttattgtattttagtttgggtgatagaataaggttttattttaataaaagaaaagaaaataaaagaaagagaagaaagaaaaagaaagaaagaaagaaaaaaggaaggaaggaaggaaggaaggaaggaaggaaggaaggaaggaaggaaggaaggaaggaaggaaggaaggaaaaggagtttttaggttaatttagattgttatgggttaaattgtatttttttaaaaattggtatgttggtgttttaatttttagtatttgagaaagtgattgtatttggagaggtttttaaggaggttattaaggtaaaatgaggttatatgagtgggttttaatttaatgtgattagtgtttttataaaaagagaagattagatatagattgatgtagaggaatgattatgtaaagatatagggaaaatatatttataagttaaggaaagaagttttagaagaaatgtgtattgttaatattaagattttggatttttagtttttggaattgtggtataataatttttttgttttttacgttatttagtgtgtggtattttgttatggtagttttagtaaattaaaataaatatattattttgtttagtatttggatatgaaatttttttaagattatgaattattagggatttttaagaaatgagtgaattaattgaaaattgataagtgtagatgataaagggttatttataaattattttgggttttatggttattatttaaaaatggagatatttttatttttttttagttttatttagaataaagtttgtggttttaatttgatatataattattatttgtatttaagttttttgagatgttgaaggaatgagtttttttttaattttttagaagttatgagaaataattattttgtaattattattgaagtaaaagaggatttttatttagggttttgtaggtattatgtgttttttttttatttttaaggatgttttttaaaatttcgagttgatggttaggtacggtggtttatatttgtaattttagtattttgggaggttgaggcgggtggattatttgagattaggagttgaagattagtttggttaaaatggtgaaattttaattttattaaaaatataaaaaaattagtcgggtatagtggtataagtttatagttttagttatttgggaggttgaggtaggtgaattgtttgaatatagtggggagaggttgtagtaagtagagattatgtaattgtattttagtttgggtaataagagtgaaattttattttaaaaaaaaaaaaattttaaattaatgtttttttttgtatttattttttagtattggggtaatatttattgtattttagtaaggatgaaatgtgtttttatttatttttattagaatggatgtgtttatttatgatttatagatgaattaataagtattaggatttggagagatttttttgaggttatagtcgttgagtggtggagtagtgataagtatttggtatttttggtttagtttagtattttgggtgttataagaattgtagaattgtaattttgatttttatatatttggttattttttttttttttatttttttttttgttgttgttgttgttgttgttgtcgagatagggttttattttattataggttggagtgtagtggtataattttagttggttgtaatttttatttttcgagtttaagtgatttttatgttttagttttttgagtagttgggattataggtgtatgttattatatttggttaatttttgtatttttggtagagatggagttttattatgtttgttaggttggtttcgaatttttgattttaggtgttttttttattttagtttttcgaagtgttgggattataggtgtgagttattacgtttggttatttggttatttttttaattagagaaggaaaatgtatggtgaaaataaagtgtaagagttttaggtttttgttttagatttattgggatgggggatggagagagagaggttgttattgtttttttgaattttagtttttagtgttggttatttaattgagagtaggaaaatttattttgtgtatttggggtattaggataaagatgatagggagttttatatttattacgaaagagaaaagggttttttttgttttatgaattatgttttagttttttaattgtatgtgtttttttgtatatataatgattttttttttttttaagtattagttgttatagggtaaatatagtaatagtagaagggaattgttattgagtttgatgttttgatggaagttttgagtggagattttattttacgtgtaggtgtttttgagttaatgtagagttttgtttgattttattttagttcgaattcgattaaggtttatatgttgtgggatttttttagttttttattagatatgataaagaatgttatatgtttagtttttggggtgtttgatggtagtgagaggtagtttttaattgggggagagttttggggttattaaggttttatagattttattattgttgggttacgtggttttagtttcgtgattataatgggtttatgagtttggatttatttttgatattcgtgttttttttttttgggtttttataagtggtttttggttgagatggggggaaaggaaatagggatttaaaatttttgattgtttagtggtttttttttatttttatttagagataatatggttatttcgttaaatttttgaagacgcggttaatataagtaatagaatatagagagttgttttgaatagagttttatggaagggtggttggtgttttttagattttttgtttatatttgttgggttttttttagtatgaaatgttttagagatagttatattttaagtttggatttttaaagtaaagggtgtgagggttttatttttggttaaatgagtattgaatttgagagagattaggaaattttttaattattgggatattttatttttgaattttgaattttggaagttggtttttggttagggaagtaggtgtttttatattttgtttgtttttgtgaggttttttgtttttttgttttttttatttttttattttcgttaattttagaatagatagaaatattttgttttttttgatgttttttgttataaattttaatggtttttgattgaattaataagtgaaattaattttaataaaatatgaggtttaaagaatggtatttgatatgggtttagaatgaataaatggattaagtaatgaattttgagaaaatgtatgtaaaatttatttttaatttttaatggtattttattaatttgattgtggaattaataaatgattttaaattaatattaaaacgtgtaattataaatgtgtgaatgtatagaagtgtgaatgaagggtagtgtatataagaaaaaaagatgtgtatatgaagaatttttttattttaggtttttattgatttttttggttaagatgggataagagtttaaaaatatgttttttttatatggttaaatgatttagtataaaatataattgattgaatataattatttatgttttaaatatattagaaaaaatttataaggaaaaatgattttataattattaagattttaatttataataaaataaagtttagaaatgtattttttgtttttaattttaatgattataggattttagtgtttggttttgataagattatttaaaataatttagggaagtttttttaataaattttatagtaggattatagttaaatttatgagtattagtagaagtaaataatgatattgtttttaaaattttattttgaaaaatatgtttgaaagtggttgattggtttttaatttaattattattcgaggttatatgttagattggtaaagttgttgtaatttgtatgtattttatttttgtaatgtaagtgttttattttattattagataaaataaaatgttaagttggatatggtggtgtatatttgtagttttagttatttaggaggttgagtgggaggattttttaagtttaggagtttaaggttgtaggaagttttgatggtgttattgtatattagtttgggtaatagagtgaggttttgagtttaaaaaataaataaattaattaaatgttaattttaaattttattgttagtagtttaattttgaattgattattggagtttttttttttgtttttttttttttgagataaagttttattttgtcgttaggttggagtgtaatggtatgatttcggtttattgtaatttcgttttttgggtttaagcgatttttttgttttagttttttgagtagttgggattataggtatttgttattatgtttggttaatttttgtatttttagtagagacggggttttattatgttggttaggttggtttcgaattttcgattttaggtgatatgggttttttaaagtgttgggattataagtatagttattatgtttggttttgagattttatttgagagaagttgttgtgaaaatttagagaatatgaataagaagtaaatgttaattttgtttttaaattataaattaaaaggaaattttataaatttttaatattaagttaaattatggtagaatgaatgattaaaaattattttataaaatatattagttgttaggtgtatttgaatattaataaaagatgaatggaaaaaatgttttaggaatgaggttaagagttcgagattagtttggttaatatggtgaaatttcgtttttattaaaattttaaaaattagtcgggtatggtggtgggtatttgtaattttagttattcgggaggttgaggtaagagaattatttaaatttgggaggtagaggttgtagtgagttaagatcgtattattgtattttagacgcggtaatagagtgagaatttgttttaaaaataaaaaataaggaaggaaggaaggaggaaagaaagaaagaaagaaagaaagaaagaaagaaagaaattatatttagaataaaatttttattttatagtaaaattttttattgaaaaattattttattttatatataaataagaatttagtatttttttatatttagagataatagagataaataggggttttttgtggggtttagatattttattagttgttgagtgtaagaaaatttattattgaagaagttgaaattttatttttttttgaaatgggatttttttaaagttagtaataatgaagttgttatttatataatggatgattgaataaaaagatagtgatagtagatgttgtattttgtttttgtaatgttgggaacgggttttttaaaatatggttataaattggttttaaaattggttataaataaaatttttgtagtattgtgatatgttcgtgatggttatgatgtttacgttggaatgttgtgggtttatcggaatgggggtaaggaatatttggtttatttagagtggaaaattatttaaaggtgtttttaaattataaatagtagcgtgagtaatttgtgttttaaggatatgtttttgttgtagataattagttagagtttatttttttattttagtttatttttttgttttttgtaaggaatatttttagttaatttataatttatagaaataatgtttattattggtttgttgttaataaatatatgggtaaatttttgtttaaggtttttggttttgaaggttgtgaaatttttgattttttattttatatttttatatttttgtgtgtgtatttttaatttttttagttttgttgggttagggttttttttattaagttggttttagtaagtagtatttatacgtgggggttcgaatttaggttgaagggtcgttagagtaatagttggagaatggggaattaagttggaggatatttaagtatttttaagtaattttcgtagtgagtaagatggggagtttggaagtatcgggtaataatgggataagtgtgggttttggttcgttttattttggaatttttttatattgatgatgaggaggaaggagagtatgacgaagtaatagaagaggttatagagtaggtttatttgttagttaaagttaaagtggtataggaggaagaggtttatttttatttttttgtatttttttattattattttgaagaaaaagagtggttagattttttagattttttttttttggaggatattgggcgaaaagtagttgttttagtgattgagtagtatttcgagcgattgttgttagttttatttaggtaggagtttagtaggttagacgagagggtgatatagaggtttggtagttttttgttagaatatattatttgattaatagggaaatattatagttatatttgagttttttttttttaaattatttaaataatttaaataagttattaattagtatggattaggttttttttttgtaatgggattgttaaagaatgttgttgtttttagtcggatgatttttattgatagggatatttttattcgagtttgtttaagttttgtttaatttttataatttaaaatttggtgggtagatgaagtttttatttaggttgtttgtaatgtttaggtcgaaatttaaattaatataatatggattaatttttgggggtcggttgttgggttggtttagacgtataagtggttatataggatgatgtcgtagagtagtttagaggagtgtgtattagagtttgggaaaaaattattttaggtggagaataatattttttttttagtgttgtaaaatagggattaaaagaattgtatgtagattttatagtttggaattttttaagataggagttttttaaaaaggtgattttagatttagttgtttaggatatagtgttgtagttattagtttttggtaatgttaatttcgattgttaggttgttttgcgatttattagagggaaagtatatttagttgattatattaaggtttgtgacggtatcggaggtaatttgtataaagttattttgttggtataggtaatggtaggattgagagtggataaaggaaatattttattttttggagtttgttttaattgtttgaagtatgattatattaaaaaataatgtagaaaaaattagtaagttaggttattatataggggaaaaaaagaaaattattgagtttgaaatatgtttaaaatgtaaaaaaggaaaatattgggttaattagtgttattttaagtttgataaagatgggaatttgattttaggaaatattatgaggggtttatttcggggttttattttaaatcggggtatttttggtttaggttatttttttatttttgtataatatttgtttttcgttatagttagtagtattatagtagatttatgttgtataaaagttgtgaggtttttgtttggggaaattttgtaaaaggttttaataggggtttgtggatttttgttagcgggaacgataggattatttttaggaaggtttagtttaagtttaaaaggtatataaatatatataggggttattgatttagattataatggggaaatttaaattgttatatttatttttgttttttggaaagtagagttaggagagtgtatagtatagtttttgattgtgtcgtatgtgggaatgggaagagtgaaattaaataaataggaggatttggaagtataaataaataaggtaaaatagtttattgggtgaattaaattattgataaacgttttatttgtgaaataattatttagggaaagaaatgtaaagatttggtagatataggagcggatattttaattatttttcgatagtattggtcgtttgcgtggttagtttaatatatttaatttaaaatagttggagttggtaaagtttttgaagtatattaaagttattatattttgtattgtgaaggtttcgatggataatttgggattatttaattaattataattttcgtatttataaatttatgggggagagatttattataataatggggagtataagttttatttttagagtaattatatagtttttaaagttaatatatgatgtatgaaatggggtatgtttttggtatgggattaggaaaaaatttgtaaggtttgaaaaaaaatgttttaagtggagagataaagttttcgttaaggtttagggtattatttttgatggtagttattgttaagtttttagaatttatatttttaaaatggttaatagataagttaatttggatagaatagtggttgttaagtaaagagaaattggagattttagagaatttcgttaatgtataattagaaaatgagaatatagttataatattttttttttggaatttttcggtttttgtaattaagaaaaaattaggtaaatggagaatgttaattgatttaggagttattaatttagttatataagttataggagtattatagttaggaaggattttttttttattatatttttagttaagtaagatagtgaacggtttgtatttataatttttgtggtaaataatttgtagtttgttaagtatttttattattttatagatgggtttagtaatggtaaagttttttattttggattaaaaggtaaagttttttaggtaatttatattttagtttagaaagtagagtttgtagttgtaattgaggtgttgattgtttttgatatgtttgttaatgtgatttttgattttttatatatggtttattttacgtagttaattgaaaatgtttagttatgatttatatagatgaataattgatgataaaaataaaaaagggggagaaatagggattacgagatagtttatatataattgaatttagtattattaattttaaattttttgaggttgtttaaaggttagatgttattagtagttgaatagtatttatagaaattagttgtaaagataggagtagaataattggtttggtgaagagatttaataataaaaagttgggatataggtaaaataataatttgggtagaggttatgtttgtgtttttttaggttaaaattagtagttaatttggatattattaagatatttaaaattttattatgagttagatgttaaggaagagattttaggaggatttcgaggattttttggttgtagttatgttaagattgatgttgaggaggattttaattgttacgagtaatattcgttgaatatagttatttatttggggatagattaagaagttgttatagatggtggaagaaaatttgaggaaagcgggataattggttataatgattgtttattggaatgaaggttgtgagattttttattttttattttatacgttatatttttgtgtgtgtgtttttaatttttttagcgttattgggttagggtttttttgattgagttggtttcggtattgtaattttgttttgtttatatggtattatttatattttaattaattaaaattaaatggattttaaaagttagttttttatttgtattagttatatattttaagtatttagaatttatagaatatgaatgtttgtatttgtgttataatgaatagtttagatatagatattttattattgtagaagggggttggatagtggtattttaatgttttatggataggattttgagtataattacggaataatgataattttaagtttttattttaatttatggttttttttttgattcgtggtgtagggggtagtttattttttttgtgaataaaggttaatttttttaattatacgtaagtagttaatattatttttttttagtagttttatagtgtaagttataattaaaagtgaagtgtttgaattatatttatattttaataaatggttttaaagggaaaatttatgtgaaaaagaaataaaagttaggaaaaaaaatatatagaagtttttatattaattttgatagtaataataatttttttgttgttatgagagtttatttttattttgattttatagtaattttgtttacgtttttttttaaagttttatttttatgtatatatttttaaaataatataggttattttaaattttatatagattttgaattttttgatataaatggaatcgtgttatgtgtatttttatgagattttattttagtttaaatgtatgtttgttaagttgttataggtgtttttagagcgtttatgtttattatttatagaattttatatattaaattaatttttttttgtttgtggttattttatttgtttttaggttttaaaaattataaataatgttgttgtaagtttttttgtatatgtatgttggtataatgagtatatattttttaaaattatatgtttaagagtggaattattggtgtatgtatatgatattttatttaaaaagatgatgttatattgttagataaagtgtgtgatagtttttgatggtttatattcgtattaatatttggaatagttagtgattttaatttagaaattttagtggatttgttatgatatattattatatttttttttttaaatttttttaagatataatttatatattatttatttatttaaagtatataatttaatggttttttatatatttggatttttaaattattatatttaattttagaatatttttattattttaaattgttttttatagtttgagagttgttttttgtagattagtaagatatagattgtttttagttttttttgtttttggattttgatttttttttttttagttgtatagttgataaattgtgtttttttttaagtatagtttaggaaggatatagggagaggggtttatttttttgatgttttagaattttttttatataattttaatatttaggttcggtgtttttttttttggattaatttttttttgggaatgaaagagttgtagtgttttttttttagattttttttgtgatttattttttttaaatagatattttgttttatgagttattatttttatattttttttttgaagttgtgataagatattataaattattaagagaatatggaggttaggcgtggtggtttacgtttgtaattttagtattttgggaagttaagataggtagattatttgaggttaggagttcgagattagtttggttaatatggtgaaaattttatttttaaaaatatataaattagttgggtgtggtggtagttgtttgtaattttagttattcgggatgttgaggtaagagaattgtttgaattaggaggtggaggttgtagtgagtcgaaattacgttattgtattttagtttggtaataagagataaattttgttttaaaaaaaaaaaaaaagaaagaaagagagagagagaatatgtaggttaggttttttttttggattttgaggatttgttgtgttggggtagaggtaggtggggagagaagggtaggtggaggggtaggtgttgagtggtgtgtaattttgtttcgtgtttaataaagtttttgttgtggttattttttgtgtatttgtttggattttttcgtgtgttgggatttgtgtttggtttttaggggcgggtgttgttttaggtcggaggttttatatatttttaggttgagtttttttttaagtttatggaggttacgggttgagaatgatagttttttattttgtttttagttttattttgtgtgtgtgtatttttatatgttgattttatttttttcgttagagatttataggaatagtattttgtaggagagtcgttattattttgtttcggttaggttttgttttttatttttgggtcgtgtgttttgttttttgttttttaaagatttagggtagtttttgtatttggggttttttagatgttttaaattgattgtttttatttttgtttttttttttgttttgtttttagaatatttttattttttttttttattgtagtaagttaattttttgaattaatattatgaatagatgtgttagtgtaatgttttaaatatatttttgttatttttttttttgtgggagtattttgtggttagttagggatttggtaggaaagagatggtatttttttttttttttaagattgagttttatttttgttgtttaggttggagtgtaatggtgtgatttcggtttattataatttttgttttttgggtttaagtaatttttttgttttagtttttcgagtagttgggattataggtatgcgttattatgtttagttaattttttatttttagtagagatagggtttttttatgttggttaggttggttttgaatttttaattttaggtgatttttcggtttcggttttttaaggtgttgagattatacgtttgagttatcgcgttggtttgagatggtattttttatataggtgtcggtagggttaagaaagttataaagggcgttgaagttttttgggattatttttggtaggaaattgtttttattttgaagtttgaaagagtaacgaacggagtagtttttagaatttaaggaaatttgtagtttttattaggggtagatttatatgtttgtggttgtaggtagaggacggtaatgattacggaattatagagttgtttagagggggtgagggaaatgaaaattttgagttattttttttcgtatgtttttattttttgtaggtgtttgttattatttatatttaagtagaagttaggtggtgtaggagtatgggtcgtgtttgttgtggttgttttttagtgtaggggataaggtggaggagggtgaacgacggttttgtggggagagagaagtagagaataatgtatttatttgtttatagtgtttatattttttagggaatttatttaaatattttagagtttgttttaatttaaaggtatggttttaaaaaaaaaaatatatgtaatttatttattttgaggtagaaatttaaaaataataataataataataagtattatatttatttattttaagaaaagttaaagttaaggtttagaatgtggtaaggtaaaagttaaaaagaaaaagaaaagaataagtttttttttgtttagtaagtttattttaaggatagttttatatatatatttttttttagatggtgtttcgttttgttatttaggttggagtgttatgatacgatttcggtttattgtaagttttgttttttaggtttacgttattttttcgttttagtttttcgagtagttgggattataggtatttattattatatttgggtaattttttgtatttttagtagagatagggttttattatgttagttaggatggtttcgattttttgatttcgtgatttgtttatttcggttttttaaagtgttgggattataggcgtgagttattgtgtttaatttaaggatagttataagataatattgtttgaatagttagggttaaaaaaataggttttggatattttttttttttagagtaaagttgaaggaaaaaaagagaaaaaaagattattttattgtagaatgtatgaattagatatttaagtagttattgaagaaatattgttaagaaatttatttgagatagaattaagttttgtttatagtttttttttgagttaagcgtatttttattaaataaattaagtatttattttataagattttgtttaattagttatcgttaaattaaaagtgatttttaagaattaaaagaattaattttaagaaattaaatgtaggttttagaaatagttatgtaaagtgtttatagttaagtatataaaagaatgtttagaagtttaatagatttagtaaattttttaaatttagtagttttgtttaagttaaaaagtagaatttaatttttttaagatttatgtaagataagttttatagagtaattttgtttatttttattgttgttaaagttgtaagaatcgtgttttaattttattatagtcggttaaaatcggtagtttaggataagtgaattagttagtaatatttagattatttaattcggttgattttgagataagattaagttgttgttgaagacgatagttttgttttggttatttcggtggttgattagtttacgtatagttgaagtttgaagaaataataagttttgttttagttatatatcggaagttgattagtttatgtacggttgaagtttaaagatttattaagtaagtaaatgtagttagaaattttaagattagtagtttttttgtaatattaattgtttttttattgttttgttattgtgtttaatttttttttttaaataaagattttttttgtttttgttagatttaaatatgttgtatattgttttgatgttgttatttttttaattatattagaagaaatattgatagaaaagtgtttttattgtatatatattatttagttaaagaatagtataattagaattttgttgtattatatttataagtgtataaagattcgtttaagaatttgtatttataaggttgggcgcggtggtttacgtttgtaattttagtattttgggaggtcgaggcgggtggattataaggttaggagatcgagattattttggttaatatggtgaaatttcgtttttattaaaaataaaaaaaaaaaattagtcgggcgtggtggtgggtttttatagttttagttattcgggaggttgaggtaggagaatggcgtgaattcgggaggcggagtttgtagtgagttaagattgcgttattgtattttagttttggagatagagcgagatttcgttttaaaaaaaaaaaaaagaatttgtatttataattagattatttgtttaatttgtgatttaagaaatggttagttttatatatgttatgatcgaagtttttatttaggatttagtttaagatttatataagtaaaaaaaaaaaaaagaagttttgtaagttaaatttaagttttttttttttagggtgggggttatatttatatattttgatatttgttagttaatatttatgaatttaatttattttataatttttagttttataaagtattataaaaattgttagtataaaattgtatgtatattttttgtttgtttttttaaggttttagtaatagtttgttggaattgtataatgtagtttattgatcgattattattgaggttaaagttaattttgtttattaaagtattagtaaaattagattgtaagataagtatttgtaattttgtaaattttattattttaaggttaaatttatttgtatggattataggttattttatggtattataaagttacggttaaaaagttaaaataattttgtatattataaagaagatttgaattaagtagttagtttaggagtaattttgagtttttaagttattttttgagtatataaatcggaagttattagagtttttttttttagttaaaaatttatttgtttagttggttgaaaatattgttgttagtttaggcgtttttttatgttatgtttgtagaaagattagtataaaagattaatggttttaagaagtaaaaaagttaatgttttaagataattttattttaattgattttttttttaaatcgatgtttataagtttaagcgtttggtttttaaaaatttttatatcgaggttaggtgtaatggattatgtttgtaattttagtattttgggaggtcgaggtaggcggatcgttaggttaggagatcgagattattttaatatagtgaaattttgtttttattaaaaatataaaaaattagtcgggtgtggtggcgggtgtttgtagttttagttatttaggaggttgaggtaggagaatggcgtgaatttaggaggcggagtttgtagtgagttaagattgcgttattgtattttagttttggagatagagcgagatttcgttttaaaaaaaaaaagaaagaaagagattttatttgtatgtatgtatttagttaggatatagtggttaggggttttaaatattatttaagagtttttagatagttaagtttttttttttttttagggtttagtttgagtattggggtgattaaatatattgtgtaaagggtaggaatttttttaatgttagtttatgaatttgttttttttagtggtgggaaatcgtattttaatttataatttattattttttttcgtttttatttttttatatttatttggaatttaggagaatgtggagagtagttagtagtaatagtagtagttgaggtttaaggaaaattgaataggaagttaaggaaatatattaggtgattaaaattgtttgttgttttgtatatgtttaagaatgattttaaaagatttttaatgattagttttatggttattaatttattgggttacgttatagatattaagtggatgagtattgtttttattaatgataggtgagttttatatttagaaggatatttatttttttattttttatgttttttatttttttatattttatatttttttttttttttttgggtgttttttttttttgggttttttgtttttattttttgtttttttttaggtgattagagtaggttggtttggaatagggtttggttattagcgtttgtgttagatgagaattatgtaaggatttagtgtgatgggtagtatcgtttcgaggttagtgttagtgagttgtttgatgagatagatgttttttttacggtgagtgttgattttatgaaatatttagtttttttttgaattttagtatgtttttttttaattttattatataggttatgggtatttgatgtataatggatatttgattggtttatgttttttggtttttgatgttgtgttgggatgtttttttgatttttatgtggggtttttgtttttttttattatattatatttttttttttatttttacgttcgttttttgaatttatatagtatattagcgtttgtatgtgtgtcgtgtgtttatgttttatttttttttttttatgttttattttgattgtgttatattttttttttagttgaatagatatagtagaggatttattaattttgggatgtgatagtttgttttttaggagaagattttagggtgggggtgaaggagatattattgtttttatttttaatagtttttattttatggttttttttttttgtattagtattatttttgaatttttatttttgattgttagaattttaaaaattttaattaggttgggcgcggtggtttacgtatataatttttgtattttgggaggtcgaggcgggtggattatttgaagttagaagtttaagattagtttgattaatatggagaaatttagcgtttattataaatataaaaataatcgggcgtgatgacgagcgtttgtaattttagttattcgagaggttgaggtttaagaatcgtttgaatttaggaggtagaggttgtagtgagtcgagatcgtatttttgtattttagtttggttaataagagggaaattttattttaaaaaaaaaaaaaaaattttaatgaaaaatggaatatatgtgtgtttgtggtatttgtatgttatatttttttattgtgtttggggagaggttattgtaggatatgatttagggtaaatttttgtaaggttgaggtgtattgttgtgaggttaaaggaggtatgggattgagattgtagagttttggttttttattatttgtttgtattagttagggttttttagaattaatagaataaatatatatataaagggggatttattaagtagtattaattcgtatgattatatggttttataataggtcgtttgtaagttgaggagtaaggaagttagttcgagttttaaagcggaagaatttggagttcgatgttcgagggtaggaagtatttagtatgggagaaagatgtaggttgggaggttagtttagtttttttatatttttttttttgttttatattttggttacgttagtagttgattagatggtgtttatttagatttagggtgggtttgttttttttagtttattgatttaaatgttaattttttttggtaatatttttatagatatgtttaggattagtattttgcgttttttaatttaattaagttgatatttagtattaattattatattgttaatttttggttttttgtggttttttttatttttttagtggtttgggagtagttgggatatttttgattttggggtttttgggggtggtgtatagtatttttaatgttgaggggtgttataggtattggtgggaagtttgggtgtttttttttaggtttttttggtgtttttttttttatttgtttttttaggttttggattttgattattagggtttgggttttttattttttttagtagagtttgatttattttagttgttgttttagtaattttttggtttgggttagtttagttgtgtggtggggttagggttttggtgaggggagttagggagggagtattagttagggtaggggggttgaggttttggaaagttgtgttgtagggtttggttgtaagtgggaaattttatttttttttttttgtttttagtttattagtttaagtttatttgtattgagaagtttagggagttttgtattttaggtataagtttttggggagtagatagagatttttggtttaggagttatattggaaagtttatagttgtagaaagttaggttgtatttgtaaaatttttagttggttaaaaaaagataaaatttgattatttgagaggttttatttatataataggaatatttttttagtttttttttgtgggttattaaagattttagagattttttattttaaataattaatggaaatattaagttttaaaaggatatatagtagtgttatggttagtttttaaaaatttttttgattaaattaagagtaaaaaaattattttaaatatttttggtagttaaaattaaatattttttagtcgggtgcggtggtttatgtttgtaattttagtattttgggaggtcgaggtgggcggattacgaggttaagagattgagattattttggttaatatggtgaaattttgtttttattaaaaatataaaaattagtcgggtgtggtggtgggtatttgtagttttagttatttaggaggttgaggtaggagaatcgtttgaatttgagaggcggaggttgtagtgagtcgagattatattattgtgttttagtttgggtaatagagtaaaattaaaaaaaaaaatattaaatatttttgttatggtttaggtttgttattttattagggaataattaagggttatttattttgtggtttaatagttataattttggttaaggtatttgggaggatattttttggtaaagaaggtgaaaagttaggaatattaattgttttttttggttaaaatttggtaataagagatgttaaaggatttttttagagttttatagttaaaatttgatttaattaaaattgatattttagattttagtgtgtatatattgttttaaggttttttttttttttgggtaaatattttttagttaattaaatgttttttttttttaattttttgttagttatatgtattttttttgtttttttatttttttgttttttttttttttttttttttgagacggagttttattttgttatttaggttggagtgtaatggcgtggttttagtttattgtaatttttattttttaggtttaagcgatttttttattttagttttttaagtagttgggattataggcgtttgttattatatttagttaatttttgtatttttagtagagacggggttttattatattggcgaggttgatttcgaatttttgatttagtgatttatttatttcggttttttaaagtattgggattataggtatgagttattgcgttcggttttttttatttatttttattagtttttttttttttttgttaattttggtgttatataagaaaaaaattaaattaaataaaattttaatagtttgggattttttaagaaaaatgtaaaaggtattatagacgtatttttgtgagaaattgttgttttttttttagggaattttaagagggaatttaagagaggataaaatttttttaggttaaaaattttgtttttttgttttgtatgatttgattttggttttgaatgggattagaaattattttatattgtgagaaaatttgattttggcgtatataatggttgggaaatgggttgattatagagtgggttgattggtattgggttgtttattagttttgagagaaagtttttgtagtaaaatatattaaaaatattgtatggttaggtttttatggtattattttttttttgggtattgaaaatttagtgtgggttttattttgagtttaatggtttagttaaaagatataggttaaattaaaagtatttatttaaatgtagttgatttttttataagattttatgatagatcgggtacggtggtttacgtttgtaattttagtatttttagaggttaaggcgggcggattataaggttaggagattgagatcgttttgggtaatatggtgaaattttatttttgttaaaaataaaaaaaagtagtcgggcgtagtggtatatatttgtagttttagttatttgggagattgaggtaggagaatcgtttgaatttgggaggcggaggttgtagtgagtcgagattgcgttttgtaggaggtattaattaaaattgtgtattttttagtttttttattaaaaataagagttattaagagttaatattataatttatagatgtaatttaaattattagatataagataaataattttataagtaatatgtaaagaaaagtagaatgtggtttttggtagaaatataagaaggtatggaaatagggtttttgttaaaggaaaagtaattttgtttagttagaggggtttattttattttattttatttattttgagatggagtttcgttttgttgtttaggttggagtgtagtggtatgattttagtttattattaatttttatttgttgggtttaagtgatttttttgttttagttttttaagtagttgggattatagatgtgtattattacgtttagttaattttttgtatttttagtagagatggggttttattatgttggttaagttggtttgaaatttttgattttttgatttattcgttttggttttttaaagtgttgggattataggtgagttattacgtttggttaaaataattttttataattttttttgttggaaatattgttgattttttttgttttgttttttagagttaagaaaattttttttttgaatatttatagttttttataatgaagcgtatttttgtaagtaaaatttgaggtatatttttttttttttatttgatttttttagaatttagaaattatttttgagattttgtttgtttgtttgttttttgagaaggagttttgttttattttttaggttggagtgtagtggggcgattttagtttattgtaatgtttgtttttcgggtttaagtgatttttttgttttagttttttgagtagttggaattataggtattcgttattacgtttggttaatttttgtatttttagtagagatagggttttattatgttggttaggttggtttcgattttttgattttatgatttgtttgttttagttttttaaagtgttgggattataggtatgagttattacgtttggttttatttttgagtatttatgatttatggtaatatatttagttgtatgagtttaataaaaatttgtttttttttttaataggatataattttgatattgattattttattaaggttttggttagaatgttatattttaagatataagtagattgttttgagaatttgagattgatgttatagaattgattaaaaaaaaaaaaaatttttggaaaaattgattttatattttgtttacgtattttttttatagggtttttgataggtagtaagtaagaatattatttttttatagatttaagaattatacgttattttgagattttgagaagatagaaatttattttatttatataagtatttgtaggtatagataaatttttggttggatttaagaaaaattttaatttgagattttttatgaaaagttttagtaaaattaatttaaaaagagtttagggttatgtatagtggtttaggtttgtaattttagaattttgggaagtcgaggcggatggattatttgaggttgggagttcgagattagtttgataaatatggagtaatttcgttttgattaaaaatataaaattagttgggtttggtggcgtatgtttgtaattttagttattcgggaggttgaggtaggagattcgtttgaattcgggaggtagaggttgtagtgagttgagattgtattattgtatttagtatgggtaataagagtggaaattttgttttaaaaaaaaaaaagagtttattggttaataattatttttgttgcgttttatgtaaataattagattaagtataataagattaaaatttattttgtagatacgttggttttattatgattttgattttggtaaaaataggggattggagagagaaaaattattttaaagaaaattatagtatatttattataagattttagttttgtttattgttttttagtttttattatttgtttataatttatttagattagattttgaatttttttttggttataagtttttaaagtaatatttttaaaagaaaaattttttttattttttttatttggaattattagaaattaaaattgtgttttttttatagttttgtaaattgaagttagaaaatttaaattttgtagcgtaatagtagaaatagtagtatttgtagataattgtatttttataagtttatttttttttatgtataatgtagatttattaagtgtaagataaatgtataatagattttttttttatttttttttttttatttataaaatgtagatttattgagtattaattagagttttatatattttatttttgtgtttgtttattgaagtatggatttttcggtagtatattttaaattatttttttaggattgtattttttttgtttttataatttggttttggttttttttttttgtttttttttttttttttttttttttttttttttttttttttttttttttttttttttttttatttttttttatgggataagagattttataagtttttaagaataagtttttttagtaatatgggatttaattttttaggaataaattattttagtagaagaggttagattaaatttatgagtagatatttatttttttttattatgttttttttgaaagattttgaataataagggagaaatgtgaaaagaaaatagaattttaggattttaaattgttatgtaagaaattaagtttggaaattgagttatgtaaaatttgttttttttttgtttttaaatatataattgtaattttatatgtttattttagtttatgtaaaatatagatttattgaatatgatgtgaatgtataattgattttttttttttttttttttttttatatgtaaaatgtgatttattaaggattaattatagttttataagtatgtaattattcgtattattgtttatttgttttttttttttttttttttttttttttgtttgtttttttttttttaaatattgaaggttttaaaattttttttggaaaaagtataggttataggttttattgtggtttatgtttttttttttttagtatatttttaattttggtaaaatgaatatcgaattgattgagatttgttttagttattttttggtttataaagttaaattaattatatttgtaaattaaaaataaggggttaggtgtagtggtttatgtttgtaattttagtattttgggaggtcgaggtgggtgaattatttgaggttaggagattagttttgttaatatggtaaaattttgtttttattaaaaatataaaaattggttaggtatggtggtaggtatttgttattttagttattcgggaggttgaggtaggaggtagaggttgtagtgagttaagattatattattgtattttagtttggataatagagtgaaatttcgttttaaaaaaaaaaaaaaaaaaagaggttgggtatattggtttatgtttgtaattatagtattttgggaggttaaggtaggtagattatgaggttaggagtttaagattagtttggttaatatggagaaattttatttgtattaaagatataaaaaattagttaggtatggtggtatatatttgtaattttagttattcgggagattgaggtaggagaattatttgaatttaggaggttaaggttgtaatgagttgagattatattattgtattttagtttgggtaataaggtgagattttattttaaaaaaaataaaaataaaaataaaaataaaaagatagtagttatttagaaaaaaaaaaataagagtttggagtcgtaaagaagataagtatttaaataaaagtattttttagtaaggtaagtttatttttgtagaagggtgttgtttgtatttttggttgttgtgagagtatatcgaataatggatagaagcgggttttatttttaacgtaattagtttttgttattgtgttttgtttttatttgttgaagttagattgtataatttaagttgattttaattggttattttaaatggagtaggagtgtgagtaagtagggcgggaagggttgttttagcgagaagagagaggttattttttattgtgtaaaatatgttagggtatggtaaaggtaggaagagttttttgtaagttatagattggaattggtgggagttggtgtttatagagcgggtaattaggaataagagagtataaggaagttgggttttagaaatagaaaataaagaataaggaagttgaagaagttgaatttttgaagaggaatttattgtatttaatagaataaatgaggtttttgtaagataattgaaatgatatatttataataattttttatgaaagtaatatattagttatttgagtttttgttttaggttatgaattttaaaatggattggtttttagtaatttatagtaggtagttttaagttataaataaatagaatttgtgaatattagttttgtttatttgtaagaatttaagaaagtgttgggtattgggttagtttaagtttattggatgaattgtgaattttataattatggaaatgtaggaataaagataaatatatataaattaggttaggttcggtggttgatttttgtaattttagtattttgggaagttaaggtaggaggattatttgaggttgggattagtttgattaatatggagaaattttatttttattaaaaatataaaattagttaggtatggtggtatatgtttgtaattttagttattcggtaagttgaggttggagaatcgtttgaattttggaggtggaggttgcgttgagttaagatcgtgttattgtattttagtttgggtaataagagtagaaattttgttttaaaaaaaaaaaaaaaaaaaagtaaattatagattatttaatgttaaggttttgttataggaaaggagttttgatttagattttaagagagggtttttggattttgtataaggaagaatttagggtaagtttatagagtaaagtaaattaagtttattagaaaagtaaaagaataaaagaatggttattttattaatagagtatttttgagggttgttggttgtttatttttatggttattttttgatgatatgttaaataaggggtgggttatttatgttttttttttttagattatatagagtaattttttgtcgttgttatagtatttgtaaattgttatggtgttggtgggagtgtagtagtgaggacgattagaggttatttttattattattttggttttggtgggttttggttagtttttttattgtaatttattttattagtaaggtttttaggatttgtattttgtgttgattttttgttttattttatgatttagaatgttttaatcgtttgggaatgtggtttagtagggtttagttttattttatttagtttttatttaagatggagttgttttggtttatatgtttttgatagtttgaatgattttttaaaatttatgttgatatttaattgttattttgatagtattaagaggggagatttttaagagttgattaggttgaatagattaatgttattattgtgggagtgggtttttgataaaaagtatgtttggtttttttgttttattttttttattatgggatgatattataggaaggtttttataagatgttgatattatgtttttggattttttagtttttagaattgtaagaaatatatattttaataaattgtttagtttgtggtattttgttatagtagtagaaaatgaaatttagtttgttatgttattatgtttatttatttatgtttgttatttttgagttataatagagttttatttagatgtgtatttatgtttggtttttgtaggaggggtttgtttttagttagggataagtagaatattatggttagtattatttataaggttaagaggttatagagttttttgagggtagtatattggttttttcgatattgtattttatttagtaggttagtaggattgtatgattgataggaattattgtagtttttatagtaaagttttatggagacggggttaaggttattgaagtttagttattagattaatgtaggagtttgttgttagagattttgttgggtattttttgtttttgttatagatgatttttataataattttttaagagagttttttttattttattttttttgtatgtggatgtttagtttttttagtgttatttattgaaaagatagttttttttttattgtattgtttttgtttttttatttgtatttacgtgggtttattttttggttttttattttgttttattgatttatttgtttatttttttgttaatataatattgttttttttaaattaaattattttggttgataaataaaagttatatttgggtgtatagtattatgtttttatatacgtatatattgtaaaatggttaaagtaagttattaatatatatattattttatatattttttgtggtaataatgttttaaataatttattttataattttgaaatatataatatgtggttattaagtttaattattataaagtataatagattttttaaatttattttttttatttaattgaaattttgtgttggtcgggtatgatggtttatgtttgtaattttagtattttgggaggtcgaggcgggtggtttatttgaggttaggagttcgagattagattggttaatatggtgaaattaaaaatataaaaattagttggatgtggtgttatatgtatatagttttagttatttgggaggttgaggtataagaattatttgaattcgagtgatttagagattgtaatgagttaagattatgttattgtattttagattgggtgatagagagagatttttgtttttttttttttttttttttttttttggtagagtttttttttgttgtttaggttggagtttagtggtttagtggtgtaattttagtttattgtaatttttatttttcgggtttaagtaatttttttgttttagtttttcgagtagttgggattataggcgtatgttacgatattcggttaattttttttgtattttagtagagatagggttttattatgttgtttaggttagtttttaatttttgagtttaggtaatttgtttgtttcggttttttaaagtgttaggattataggtttgagttattgcgtttagtcgagattttgtttttaaaaaaaaaaaaagaaagaaagaaaagaaattttgtgttatttgtttatttttttttaatttttttattttttagtttttgataattatcggtttatttattatgtatatgagtttggttttttttatattttatatatatgtgagattatgtttgtttttttgcgtttggtttattttatttaatataatgttttttaggtttatttatgttgttgattgaatagtattttattgtgtatatatattatattttttttatatatttatttattaatggatatttaggttgattttatattttggtttttgagaataatattgtagttaggtgtggtggttcgtatatggaatttagttatttaggaggttgaggtaagatgattatttaaggttaggattttgagattaagttgggtaatgtagtgatattttaattttaaagaaagaagaaagaataatgttgtaatgaatatggaagtgtagatatttttttgatatatagattttatattttttgaatatatatttagtggtaggattgttggattatatggtagttttatattttaattttttgaggaatttttatattttttttagtaatgattatattaattatttgtttggattattgtagttttatagaaagttttgaagttaggtgtggtagtattttgattttgttttttttttatattgtgttggttaggttttttgtttttttatataaattttttttgtttgtttgttttttgtttttttgagatagagtttcgtttttgttgtttaggttggagtgtaattttagtttattgtaatttttattttttgggtttaagcgatttttttgttttagttttttaagtagttgggattataggtattcgttattatatttagttaatttttgtatttttagtagagacggggttttattatgttggcgaggttggttttgaatttttgattttaggttatttgtttatttcggttttttaaagtgttgggattataggtatgagttattgtgttcggtttttttatataaatttttaaattagtttgtgagtatatataaaataacgttttggggttttgattgggattgtattgattttatagattaggttgggaagaaatgatatattaataatattgagtttttttggttttgtattttaggtttaagttatttttttgttttagtttttcgagtagttgagattataggtgtttattattacgtttggttaattttttgtatttttagtagagatggggttttattatgttgattaggttggtttcgaatttttgattttgtgattcgtttgttttagttttttaaagtgttgggattataggcgtgagttattatgtttagtttttttgtagtattttaagatgttttaggtttattttgtattttttttattttatttttagaattagttatttttttaaggagttttggttttttttattggagattgatgtattataattaaaatttgggtattgggtgtttattttatttttttaaggaggatatagaggttttgttgatgatatttgtgatatttttgtttttgttttttttatttaaaagaatgtaaataagggatatatagtaaaggagatgtagtatagagtaatttattgtaaaggaaaaatgatattttgaaagttaagtgtagaatagatagtatgttttgagagagaggatttagggtgggttgtttttaaggatgagatagtattgattattgttgtagaaattttttttatgggggttttatatgattatttataaggaggtgggaagaggtgttattagttagtatgttttgggtggttttttgggtgggtggttttttggatgtatatgtgtagtagttatatatgtttgtttatgtattttatgttttataagtattttaaatttttatttaggtgtgtgttttttattattgtaatgagttaagggttagtttgacggtaggtaaaattaaaatgcgtatgttttttatagggtaaattttttattggagatagttttgtttgaatgagttggtttataatgtgaatgttggagtttattgtgttgattgtatggttattattgttgttgtattttaaggatatagttatttttttgattttttattttgttttaatttttttttaaaagattttaggatttataattatacgggaggatgagaggttaggttattttttttagagttgttttttgttgagtgcggtattgtttttgtttaatttgggttttgaagtttttttttgtttagtttaatagtgtgtaagttatgttttttaggggattggtgggtaagatgtgagatagtttattagtagttaaaggttggaagttttgtaaaattattatatgaatcgggatttgttgtaggtgataaagtaagaaattagtaattttttttttttttgagatagtttggttttgatgtttaggttggagtgtaatggagtgattttagtttttagtttattgtaatttttgttttttaggtttaagtaatttttttgttttagttttttaagtagttgagattatagacgtttgttattatatttggttaattttttgtatttttagtagagatagtgtttcgatatgttggttaggttgggaaattagtattttaaataaagttggattaaaagttagagttaaatatatggtaatgattggtattgttaaagggagtaaggtagaaaatagttattgtttttaagtttttacggaagtttttaaatatttaattttgtttgtttgggtaatgatttttttattttaagaaaatgttattaatatatatttgtaatttgattgatgcgaaaataatattttttttttagatataaatatgtttttcgttgtttaattgtgagaaggtttaaggtttttcggttttgtaggattgttaggaagtttagttgttgttgaagtttagtgaggttttttgttgtttgttagagggttattttggttttttgagatagtttatgttgggtttttaaggttttgtttttgtggttggttttgttagtttcgatagagaggatagtattaattttaagggaataaggaattttgtttagcggtggattttgtgatgttggtatatggggaaagggagagatttgttagttaatgtaaaaggtagataaggggaaatgtaaattatgggatatcgttttttttattgtggagggagttgtagacgtgttgaagatttataaatattaataaatttttttttttttttttttttttttgagatagttttattttgtcgttaggttggagtatagtagtgcgattttagtttattgtaattttcgattttttggtttaagcgatttttttgttttagttttttgagtagttgggattataggtatatgttattatatttagttaatttttgtatttttagtagagatagggttttattatgttggttaggattgttttaattttttgatttcgtgatttattcgttttagttttttaaagtgttgggattataggcgtgagttattgcgttcggttaatataagtaaattatatgtgatggtgaaatttgtgttgtaaaagtattttgtatcgaggtggtaaaagtaatggaaatttggtggttattggattaattagaggatggtagagttgagtggtgttaataagttttttgaaataaagttttttttttagggttttattatgaggtgtataaatgattttgtgagaaaggtttagatatattgatttttttgtggagtttttttataaaaggagtgaaattggtatggttgttgtaaaggtagaaggggaattgttttgggtaaaaagtaaggtaagaaagtaattttttttttggtagagtgaagttattatttatagataaaaatggaagtttgaattggtagtggttaggtttaaggaattttttttgtattgtttgtttagttagatatttttatattatggtttaaagtttgttttaggaggtgtataggaatgttggtttatttttttcgagaaataggttttgtatatttttaaattttggtagttatgtaaagttagtaagattgagttaatttttataaattagtagtatgatttattatttttttagtagataaggtcgttttattaaaagcgtttaaaatatagtaaataaataagaaaaaaataaaaatattatattttattgtgagttgtttttttgaatagaagtttatgttgaggtaatattaattgtttgatgttttgggttttggttgtttttggataggagttttagattttttagtgttttataggaatagtttggagtttttgttttaagtttttgtgatgatttaaaaggaattattttttatttttgataaatatattaaaggtttatatttttaagttttattgtagtagaagttggttagttgtatggtagagtgaaaattttagtttggagtttgttattaatattaatgatagtgtcgtgtttggtagatagaggtttagggtagatagtgagaattgataggttagtttttgtttttaaaaggatattgatatttttgtttgttatgtttagggttattcgaggttttattgttgtgattggggttgattgttatataggagttgttttttgtttttggtttttttagtttttagttagggataataaggaattaggagttttttttttttttagagttggagatagttttttttttattgtttttttttgttatattgatgataggttttagagggtttgtaagtttgaaggtttttgttatttatttagtttcggtgtttaggttttttataagtgtaggaatagtttttgggttttatttaggatgatttggaggtgggagttttcgtatagtgagtgaaggttaaaaattgggattattttttgtttttttttttttttttttgatttttatgtgttttttttattttgttttggtaattaaagatattaaaagttaggtttagtagtttatttattgggatttggggatttatgattagttttgtgatttttttttgatatttgggatagattgatttatgaagtaggtttttaagaggatttggttgttgttttgtgtgttatttgagagagggagatatagatagagagtgagagtaggttgttttttgttttaggggggtaataggatattttgttatgagttgttttagtaggattgggttttttagggagtgtttggtgaataagttgataaggacggggtgtagaagattgtgtgttaagtgaggaaggattataggagtagaagtttaagaggtttgaagagtaattttggattagattgtaagggaggaaagttgttggtaggaggtattttttttttttttttttttttttttttttgagatagagttttatttattatttaggtaggagtgtagtggtatgattttagttcgttgtaattttcgttttttggatttaagtgatttttttgttttagttttttaagtagttgggattataggtttgcgttattatattcgattaatttttttatttttagtagagatagggttttattatgttggttaggttggtttcgaatttttaattttaagtgatttatttattttggttttttaaagggttattgttgtatttagttggtatattttttattatagagttattaattatgttagatttttttaaatttttttttgagatagagtttcgttttgttatttaggatggagtgtagtggtgcgatttcggtttattgtaattttcgtttgttacgtttaagtgattattttgttttagttttttgagtagttgggattataggtgtaagttattacgtttggttaatgtttgtatttttagtagagatggggttttattatgttggttaggttggtttcgaatttttgattttatgatttatttgtttcggttttttaaagtgttgggattataggcgtgagttattgcgttcggttttttaaatttttttgaataatatgagtataatagatttggtattagtttttaagggattggttttagtatagagttgtttggttagtagggggaataatgttaggtttttttgggtttttggaaaatttttgattatttttttttttttttttttttttttttttttttttgagatggcgtttttttttgttatttaggttagagtgtagtggttgaattttgttttattgtaatttttgttttttaggtttaagtgatttttttgttttagtttttcgagtagttgggattataggtacgtgttattatgtttagttaatttttgtatttttagtagagacggggttttattatattggttaggttggttttaaatttttgatttcgtgatttgttcgttttggttttttaaagtgttgggattataggtatgagttattgtatttaaattttttttttttttatttaaaaatagtaataataataaaaattttaattgtaaaatagtattgtttgggattatgtagtgttgaaaagatttaattatggaaatttatttatttttttttttaggttagtaatggttaattttatatgtgtttttaatgttttaattttggttttaaaataatagtttaggatatgtaagtagttatgtttattaggttttttaggtttcgtaaggggaatttggtagaaaatatattttatttagtaattagtttttttttagggttgggtattgtggtttatatttgtaattatagtattttgggaggttgaggtaggtagattgtttgaggttaggagttttagagtagtttggttaatatggtgaaattttatttttattaaaaatataaaaaaattagttaggcgtggtggtatatatttgtagttttagttattcgggaggttgaggtaggggaattgttcgaattagggaggtggaggttgtagtgagttgagatcgggttattgtattttagtttgggtgatagagtgagattttattttaaaaaaaaaaaaaaaagttttttttcggtaaagataaaattttgtttttattaaaggtagaggagttttgatatataaagtagaaagaaagaaattttaggataatttttattagttttacgggttagagagaaaaagaaagtaaatgaaagtttgtgaatatagatggattaaaaaggataataaatttttatggaaggatagaatttaaaaggggtgaaatgtaaagaagtgtaaatataataagatgattgttagtagtaagaaaaatgaagatttttagatattgtaaatgaggatttttagatagtgtatagtttggacggaagttttgttagttttataaattttttgttaaggagggttatagtgaattagatttatttggtgtgaattttgaagtttttatttttgtttgttatttattaggttattaggatgaattgataaattagttgaagggagtaaagttatagtgcgtgagaattgttttggagatttgtaagtggaagaatgagaggaaagggagagatttagtgatggaaaagaaaattttaagttttaaagtggtgaggattgtattaatagttttattttttggtaattgtttattatatttatttaaaaaaaatttttttttgagacggagttttgtttttgttgtttaggttggagtgtaatggtataatttcggtttattgtaattttcgttttttggtttaagtaatttttttgttttagtttttcgagtagttgggattataggaatgtgtcgttatgtttagttaattttgtattttaagtagagatggggtttttttatgttggttaggttggttttaaaattttaattttaggtgatttgtttatttcggtttcgtaaagtgttgagattataggtgtaagttatcgtatttatttattattttttaatttatatagttttaaaatattttaatgtttagtatatattttagaggtgttttagtgatagtagaggaggtggttttttaggtaataagagaattttgtaattatagaaatatgtattaaaatttaggaggttatcggtatttttgtgagttaagttggacgatggagtttagggtgtttttttgaatttttatgaaattgaggttttaggaggttatgggtatttgttatgtattattttaggttttattggtgttggacgtttttaagttgaattgaagtgatttttgttgttagtcggggagtttggatgttttattaataagtttttttttattttattgatttgttatttttaatgtttagttattatgtttggaatgtttggttatagtttttatgattatatatttatgtggttatatattttgtatttaatatggatggttttttggaacgttttttgtttttagaggagacgtttagaatatatttttttgagatttagaggagttttagaatatatagagtttggaggaatggggattgttggtaaaagtagatttaatgtgttttttaaggtgaataaaaatttttgaagagattatttgattaataaataagtgttgggcgcggtggtttatgtttgtaattttagtattttgggaggttaaggtgggttgattataaggttaggagttcgagattagttgagttagtatggtgagatttcgattttattgaaaatataaaaattagtcgggcgtgatggtgtacgtttgtaattttagttatttgggaggttgaggtaggagaatcgtttgagtttaggaggtggaggttgtagtgagtcgagatagagttattgtattttagtttgggtgatagagtgagatttttgttttaaaaaaaaaaaaaaaaaaaaaaaagttataatagttagtaagtatagattaggtgtagttttgggaggaatagtaaaataaaaagtgaaatagaagtagtaaaagttttaaggttgaataattagggcgttttatttaaataaggtaattgtaaatattgtaaaagtagtagttaaatggaaagtaattataattagttgtttaaagaatgtgagtgagttaaaaggtttttttttaaaattttaatagatttggggaaagtagtgatagttaattaggggtttttggttgttatagtatttattagtagtgaagggaaattgaaattaacgaagtagataaatttttgagttatggtatcggaaatgttgacggttgttgtaatattttggtttttgatttttttatttaaaagaatttaaataagaaatacgtagtaaaggagatgaagtataaagtaatttattataaaggaaaaatattattttgaaagttaagtgtaaaataaattgtatattttgagaggatttagggtgggttgtttttaaggatgagatagtattgattattgttggagaaattttttttatgggagttttatatgattatttataggaggtgggtgggaagaggtgttattagtaagtatgttttgggcggttttttgggtgtacgtgtgtagtagttgtatatgtttgtttatatattttatgatttattagtattttaaatttttatttagggttgtgtttttttttattattgtgatgagtaaagggttagtttgagaataggtggaaatgtacgtgttttgtatagggtaaattttttattggagatagttttgtttgaatgagttggattataatgtgaatgttagagtttattgtgttgattgtgtggttattattagtcgttatgtttcgaggatatgtttattttttttattatttatatttttttaattttaatatttgtttgagtttatataggtaaataaatgatttattttagtattattttagagtttatttagtgtagtttttgatattttttagaggagaagttttttaagtatgattttattttgtaaagttttcgtttttttagtttgtagagttgagatattgataattttatttttaaatatttagagatttttttataagatttttatattttggtaataaattttatttataaaatttgttagaataggtaaaaggaaagagatagtaggagggattattaagattttttttttttgtggagtattttattgtttttgtttttttttttatttttttgggtttgggggaagggtagttttttcggattatgaaagaaaaatggtaatacggaaatatttgtttttatcgttttttttaatttttttattttgttttggttgtgtttatttttttttttattttttggtttataagtttttttttttttttaattttatcgagagtttaaatttttatttatagttggttttttagtgggaattgagttattatttgttaaagggtagaagaggagagagagaggttagagtttggggatggggtagaaggtgcggtaggaaggaaggttagagtgagaaaaatttttaaataaggggtgatgtgtgagtgtttagagggtgattgaggatatttttagtatttttattgaggagggaggaaggaggggtttttgggttttggggtagatgtcggtagggtttggatgagatgtttttaattttaattttggttttttgaaaatattttatttagttatattgaggagtttttttaggtttaggggtttttttaggtaggcgtattttagtttttttttggaaggatttttatagttgtttagttttggtatgttttatttttttggttttggtttttttgagttttgagttcggggttggttttttttttttttgtagtcgggttagagtgagtttggtagatgagaagttaggtgttttgtatggtaaggtgtggttgtttttagggttttttttgttagggattataagttttggggaaggaggtattcgatgtaggagatagagagtagagaggtggagtgagggtgggatacgttttggttttttttttttttttagtttttttttatatgttagtgtttttttttttttaattttaggtcgtataagagttatagtaggaagggtagatttgggtttttaatattttttgaagaagtttttttataagtgtgtttatttttatttttattgtagttttagggtttgttttagtgtagagttttgggtatgtatagagtataggtgtatatgagggtgattttggaaggttttttttttgtatatatttgcgtgttttagttttttttttttttaagtttgtttaaatggtatttttatgaggtttattttgattattttatttaaaatgttatttttattattttgtattgattgttaattttgtatttttttttttatttttttttttttttttgaggtggagttttgttttgttattaggttggagggtagtggtgcgatattggtttattgtaatttttattttttgggtttaagcgatttttttgttttagtttttagggtagttgggattataggtgtacgttattatacgtagttaatttttgtatttttaagtagagatagagttttattatattggttaggatggtttcgattttttgatttcgtgatttatttatttcggtttttcgaagtgttggggttataggcgtgagttatcgtatttggtttattttttttttttattatttattattttgtaaatataaaagtttttttttaaagatggttttaataatattttttattttatatgttttttagtaatgtgattttgttattttttattaagagttgatgttaatttttttttttggatttgggatttgttttggtgattagaatatgaggaacgtgatgttgtttgatttttgaggttttagtataagatgttttgtggttttgatttggttatttgaaatattcggattttaggtgtagagttagaagtagttagggtacgtggaggagtaggtggaggagaaattaagttatttggtttatagttttagtgagtttttagttaataagttagtattaattgtagttttgtgtaggagttttttgaatgtgttggattagttgggttttagatgatggtggtttagtttatgttgtatggagcggaagagttgtttagttgagtttaattagtttatagaatgagagataatataaaggttgtttataatatatatatatatatatatatattttgggggggatggagttttattttgttatttaggttggagtgtagtggtataattttggtttattgtaatttttacgttttggttttaagcgatttttttgttttagttttttaagtagttgggattataggtatttattattacgtttagttaatttttgtatttttagtagaaatagggttttattatgttggttaggttggtttcgaatttttgattttgtgatttgtttattttagttttttaaagtgttggaattataggcgtgagttattatgttcggcgtttgtatgcgttaagattattttttgtttagtaattaattgttggaatatatttatataatttattattgttattatatttttttttattgttttttagattgtaagtattagggagtaggtgttagttttttttgattaaatgattattaggtttagaaaaatgtttggtatagaagtatttattaaatatttgttaaatggatgaataaattatgtgattagaattttttaatattgggttcgagattagaaagtgggagttattggtttggttttggtatttgtttagttagtttgtgttgttataataaaatattatagatggattggttaataatagatattttttttttataattttggattttggaaatttgaggttagggaattagtagatttagtttttggtgagggttttttttttgtttggtagatagttgtttttttgttatatttttacgtggtgaagagagtgggagttttagtttttttttttttttaaaaggatattaattttattatgggggttttaattttttaattttttttgaatttaattattttttaagatggttattagttttaaggagtttattgttatagtgggagtaaagatgttatagtaggttgtaaaattaggtgttattttagttagtggggagaggataggtaatttagggaaggggatttggatagagtttatttataggatatggtaggttttagaattttattgaaattaagtttggataaaagttaataatatttttttgatcgaattttttttagtttttttgagggatgggtaggtttattttagaataaagaagatgtttggggtaaagaagattagtttttaagggtattggttaggatatttaggttttattggttattaacgtttatttagattttttttgggtggagttttgttttaagttttttatagtttttgtttgtatttttatggtgtttattatggataatagggttatagttagttttagagttagattgttaagtgaaattattgatttttgttgaattatttttttgaggttgagataaattttatattttagttttattaataagattaattgtaaatttaaatggtttgtaaatttataaatagtcgtttagttgattagttagaatattgaggattgttaatgatataggaaaaggtttattttggaggtgagaagttgaggagtttgaaattgtttttattgtttatgaaagtaatttgataattatgaatgaaaatatttattatttttcgatttagtaatttaaggtgggaaatattttttttttttttgagacggagttttgtttttgttttttaggttggagtgtagtgatgtaattttagtttattgtaatttttattttttaagtttaagtgatttttttgttttagttttttaagtaattgagattataggcgtgtgttattatgttagggtaatttttgtatttttagtagaaacgaggttttattatgttgattaggttggtttcgaatttttgattttaagtgattcgtttattttagttttttaaatgttgagattataggtgtgagtttaaatttttatttttaaattattgtataatagtttatagtttattgaatggagtatagtaataaatattgttatatattttgaattttaatttttttttttttttttttttttttttttttttttttttttttttattttttgatatagggttttattttgttatttaggcggagtgtagttgtgggttaattatggtttattgtagtcgcgatttttttaggtttaggtgatttttttattttagttttcggagtagttgggattataggtatgagttattttatttggttaattttttgtatttttggtggagaaggggttttattattttgtttaggttggttttaaatttttaggtttaaattatttgtttgttttatttttttaaagtgttaggattataggtgagttattatatttagttaattgtttttatttttgtaagagatatttttcggttaggcgcggtggtttatatttgtaattttagtattttgggaggtcgaggcgggtggattatttaaggttaggagttcgagattagtttggataatatggtaaaatttcgtttttattaaaaatataaaaattagtcgggcgtggtggggggtgtttgtaatcgtagttatttgggaggttgaggtaggaagaattgtttgaattcgggggggtgggggttgtagtgagtttagatggcgttattgtattttagtttgggtgatagattaagattgttttaaaaaaaataaaatatataaataaataataataataatatgtaagatttgttttacggtattttgaggtgatggtaggtagaaataaagttagttttattttttttgggttagggaaagttgagatggttttcggtttcgggtgagttattttttagggtttaggtttggttgttcgtttttttttttttttaatttatttatagttttttttgttttgttttattaattatatttttttttttagtattcgttttagatttttggatttatagtatagaggcgattttttttttgtagattttaggcgttattgcggggttcggaaaaaaaagagaaacggtttagcgttgttatttatataatttagggcggggttgcgttcggcgatcgtaagcgttttgaattttgcgttttagagtttattgcgaggattgggattattcgttatttcgttttggtttacggaaaatgataagtgtttattgatatagaaacggaataacggcgttgtgggttggggtgggcggagttgtttttaggtttttggtttttagcggcggggaatttatatttgtcgttgtgaaaatgtagattcgcggggtagtaatttcgagtttagtttggggcgcgatttggaattttgattcgtttgaaatattacggcggattcggagataggtgagtagagaaatgagttttagttttttttacgggtcgtttacggattttaggattcggaaattttttttgttgttgcgttattttaggaaggtagcgttcgtttttgggtagttttgatggaaattggtttcgcgtttagaggaaaatttataattaaggggttaagaaaaagtttttatggtttcgtttttttagtgaggattttaatttatatttcgagtgtggtttttattaaagtttgtagtgatagtcgagcgcggtggtttacgtttgtaatttcggtattttgggagattatggcgggcggattatttgaggttaggagttcgagattagtttggttaatatggtgaagttttttttattagaaatataaaaattagtcgggtgtggtggtaggcgtttgtagttttagttattcggaggttgaggtagaaaaatggtttgaacgcgggaggcggagtttgtagggagtcgagatcgcgttattgtattttagtttgggcgatagagattttattttatatatatataaaaaatgtagagtgacgtttattgaaatgatattagattagcgggagggatttagagcgttgcggtttatagaatgcggtgatagcgtcgtttcgcgttttttattttaattgttttaggtagacgtggttacgtgtgttggtttggaggttggaatatatcggggttaaatgtagagtggagaaaggagggaaggatgggaggacgtgttgaagaaagatagtaagagttagcgttatggtttatatttgtaaaattagagttttcggaggcgaggtaggaggatcgtgtgagattaggagtttgaggttgtagtgagtcgtgattatattattgtattttagtttggacgatagagtgagattttgtttttatatattttttatattttttgtaattaagtaagttttgtgttcggaattggtgggtttttgattttattgattttaagaatgaaattgtggattttcgcggtgagtgttatagtttttaaggtggcgcgtttggagtttgttttttttgatgttcggacgtgttcggagttttttttttttggtgggttcgtggtttcgttggtttaggagtgaagttatagagttttgcggttagtgttatagtttttaaggcggtacgtttggagttgtttgtttttttcggtgggtttttggttttgttggttttaggagtgaagttgtagatttttatagtgagtgttatagtttataaaagtattatggatttaaagagtgagtagtagtaagatttattgtagagcgaaagaataaagttttagtagtgtggacgagaattcgattgggttgttattgttggttcgggtagtttgtttttatttttttatttggttttatttatattttgttgattggtagagtcgagtggtttgttttgatagggtgttgattggtgcgtttgtaatttttgagttagatataaaggttttttaagtttttattagattagttagatatatagtatggatataaaggttttttaaggttttattagagtagttagatatagagtgtagattggtgtatttataaattttgagttaaatatagggtgttgattggtgtgtttataaattttgagttagatatagagtgtcgattggtgtatttataatttttgagttagatataaaggttttttaaggttttattagagtagttagatagagtgtggattggtgtatttataaattttgagttaggtataaggtgttgattggtgtgtttataatttttgagttagatataaagattttttacgtttttattagatttaggagtttagttggttttatttagtggatttcgtatcggggttgtaggtggagttgtttattagtgtcgtacggtgcgtttgtattttttagtttttgggtggtcgaatgggattgggcgtcgtggagtagggggtggtgttcgtcgaggaggttcgggtcgtataggagtttttggagtgggtgggaggtttaggtatggcgggttgtaggtttttagttttgtttcgcgggaaggtagttaaggttcggtgagaaatcgagcgtagcgttggtgggttggtattgttgggggatttagtatatttttcgtagttgttggttcgggtgttaagttttttattgttaggggttagtagggttggtcggttgtttcgagtgcggggttcgttaagtttacgtttattcggaattttagttggtcggtaagcgcggtatatagtttcggttttcgttcgcgtttttttttttatattttttcgtaagttgaaggagagggttttagttttggttagtttagaaaggggtttttatagtgtagcggagggttgaagggttttttaagtgtcgttaaagtaggagtttaggtagaggaggcggggagagtaagcgagggttgtgaggattgttagtacgttgttatttttcggttttattttattttaggataaaatatttattgtgaattttaaaaatatgtaaaataaaattttaattaaaaagtttaaatgttttttttttatttattttgaaggaaatttttgttgatggcgtatttaggaatttatttattttttgaagatttgagttttgtatatattaaaattgtatattttttgtggagtagtttttttttttgaaatgtagatattatttttttaatttttaagttagttattgttatttttagtgatatttttattggataagttttttatttttattgaaattggttttagagttgtagttaagtattgggagttatggtagaagttattgtggggtttgtatttggttgatgtggaaggtagttttgaaaggtagtgtgtgattaagtgggttttggagggtagggatgtgtttggtgagaggagaataagatagataggaaggttttaaaagaaaattttaggggtttttgtgtttaatatcgggatttagaaaatttttttttagttatttttgatttgtttttatttcgtttttttgtttattaggttattgtaggtagtttttttattgaataaatatttattaaatatttattacgtgttaggtattgtgtttaaggagttggggttgaggtaagaggaattaaattttttttgcgtttaaggttgttttagttttgtttaggtagagattagttaggaaattgtaatattaatggttggtaggatatgtatatatgttttgtaaatttataagtagattattttttttgatttaggagttatagaaagtttataaaagagataatgtttaagttatgttttgaggtgtaagtaggagtttaataggtatttgggataagagagtattgtttagaatttagaatatgaatttttttttttgggttaggttaagaattagattaagttgattgaggagttagatgttttttggtaagaaagggtgttttatatttgattattttaaaattatagttatttaatgttgagatttaagatagatagaaaaagagaaaggtttgattcgaaaagtagaattttttaggggtggggggaggttaaattgtagtttttgatataatatgtgtgggttaggttagagaattgtatttttttttttatttatttatttatttattttgagacgaagttttgttattgttttttaggttggagtgcgatggcgtaattttggtttattgtaattttcgtttttcgggtttaagtgatttttttgttttagttttttaggtagttgggattatagacgtttgttattacgttcggttaattttttgtatttttagtagagatagggttttattatgttggttaggttggtttcgaatttttgattttaggtgattcgttcgttttagttttttaaagtgttgggattataggcgtgagttattgcgtttagttgagaattgtatttttaataagtttttaggtgatgttagtgttgtttgttttaggattatattttgagaattattgttttaaagtaatttggtttgatttttaataatagaagaggattgggagagtattatgaggtagaagtgtaggataaataagattatattttgtttattttggagaattcgtaagtttaaggttgtagtatttgaattttttgggagtttcgggaattgtagatatttaggaagaaattgaatgtgggttagagggtgatgtatgttttttgttttatatagtatttggggtttttgttattatatagtttggtttttatatttttaattttttttatttttttttgaagtattgatttgtaggttttattttattgtttttagttgtttgggtttggtatatgattttaggcgtttttatcgtattttttgatttaaatatagggtgatttagtatgataattattagtagatttatagggataatagaatgggttaagaatgagaatttttggttgcgtacgtttgtaattttagttatttgggaggttgaggtgggaggatcgttggagttcgggaggtggaggttatagtgagtagagattaggttattaatattttagtttgggtaaaaaagtgagattttgttttaaaaaaaataaaataaaataaaaaggtcgggtatggtggtttatatttgtaattttagtattttgggagattaaggttaatggattatttgaggttaggagttttagattattttggttaatatggtgaaattttgtttttgtaaaaaatataaaaagtagttaggtatggtggtatgtatttgtagttttagttattttagaggttgaggtagagaatcgtttgaattagggaggcggaggttgtagtgaatcgagaagattgtattattgtattttagatggggtaatagagcgagattttgtttttaaaaaaaaaaaaaaaataagaattttgaaaagttggtaagtggttttaattatatgttttttagaattataagtgttttttttaaatattatatttttgggtttatatggatattagagggtattttgagtttattgaagttataattgtcgtattagattattagaattttttgtaaaggttaggtatggtggtttatatttgtaattatagtattttgggagatcgcggagggtggattatttgaggttaggagttcgagattagtcgggttaatatggtgaaattttatttttattaaaaattagtcgggtgtggtagtatgtattagtaattttagttattggggaggttgaagtaggagaattatttgaatatggaaggtagaggttgtagtgagttaagattgtatttttgtattttagtttgggtaataatagtaaaattttattagaaaaaaaaaaaaaaaagaattttttgtaaagattgcggtttggttgggagtagtggtttatgtttgtaatgttagaaatttgaaaggttgagggtgggttacggtggatcgtttgaggttaggagtttaagattagtttagttaatatggtgtaattttatttttattagaaatataaaaattagttgggtatggtggtatgtaattgtagtttttgttatttaggaggtaagagaattgtttgagtttttaaggtagaggttgtagtgagttaagattgtattattgtattttagtttggttaatatagtaagattttattttaaaaaaaaaaaaaaaaaaaggagtgatataatttttagataattttttttttttttttgagatggagtttcgttttgttatttaggttggagtgtagtggtacgattttggtttattgtaagttttgtttttcgggtttacgttatttttttgttttagttttttgagtagttgggattataggtgttcgttattatatttggttaattttttgtatttttagtagagatagggttttatcgtgttagttaggatggtttttattttttgatttcgtgattcgtttgtttttgtttcgtaaagtgttgggattataggcgtgagttatcgcgtttggttttagttataatttttgtttttttttaatgaaggtaagagaattttattaggttgagttttttttttaaatttttattatgagttttttgggttttttttttttttggaattattttttgtgtttttatttggttaaaaatttaaaaggtttaaaaggtaaaaagtttttgttttggtcgggtgtagtggtttaagtttgtaattttagtattttgggaggtcgaagtaggtggattataaggttaagagttcgagattagtttggttaatatgatgaaattttcgtttttattaaaaatataaaaattagtcgggtgtggtggtgggtatttgtaattttagttatttgggaggttgaggtaggagaattatttgaattcgggaggtagaggttgtagtgagtcgagattttgttattgtattttagtttgggcgataagagtaagatttcgtttcgaaaaataaataaataaattaattaattaaagaaagaaagaaaataaatttaagatatttgttcgggtttggtggtttacgtttgtaattttagtattttgggaggtcgaggcgggcggattatttgaggtaaggagttcgagattagtttggaaaatatggtaaaattttgtttttattaaaaatataaaatattagtgggtatggtggtagaaggttgtaatttagttatttgggaggttgaggtagaagaattatttgaattcgggaggcggaggttgtagtgagttgagattgtattattgtattttagtttgggtgatagttagattttgttttaaaaaaattaaataaatttagacgttttatgtatatgtaagtaaatataagtgtgtgtgtatatatatataatttttttttttttatataaattttagtaaattatatatgtttttttttattttgttttttttttttttttgagataaggttttattttgttatttaggttggggtatattagtatgattattatttattgaaggtttgaatttttgggttttttattagttgggattataggtgtgagttataatatttggtttttttttgagatagagttttatttttgtcgtttaggttagagtgtagtggtgcgatttcggtttattgtaatttttgttttttgggtttaagtgatttttttgttttagtttttggagtagttgggaaattttatttgtattaaaaatataaaaattagttaggcgtggtggtgtatatatttgtagttttagttatttagggggttgaggtagaagaaatgtttgtatttgggaggtggaggttgtagtgatttgagattttattattgtattgtagtttaagatagtgagattgttttaaaatttaaaaaaaaaaattttttttaaagaaagaatgaattattgataggtgtaataatatggatggattatatagatattatgttaaatataaaaagttagatataaaagaggttatatttatgtatgtatttataggaagttttaaaataggtagtttagtatagtggtttatatttgtaattttagtattttgggaggtcgaggcgggtggattatttgaggttaggagtttgagattagtttggtgaatatagcgaaattttatttttattggaagtataaaattagttagttatggtggtttatatttgtatttttagttatttaggaggttgaggtaggagaattttttgaatttaggaggtagaggttgtagtgagtcgagatcgtgttattgtattttagtttgggtggtagagtgagattttattttaaaaaaaaaaaaaaattaggaaaaattgttttatagtgatagttattagatttatggttatttaggggtagggtagaattaaagagggtaaagagaattttttatattttgataggggtgtgggtgatatgtatttgttaaaatttattgatggatttgttaaagatttgattattttattttttgtaaatggtgaaattttaaaataaaattttaataaatttaataaattttaaaataaaaatatttttgttgggtacggtgttttacgtttgtaattttagtattttgggaggttaaagtgggtggattatttgaggttaggaatttgagattagtttggcgaaattttgtttttgtaagtaaatataaaaattatttaggtgtgtggtgtgtatttgtagttttagttatttaggaggttgagagaggaaaatcgtttgattttgggaggtggaagttgtagtgagttgagattatattattgtattttagtttgagtaatagagggagattttgttttaaaaaaataaaatagggttggggataaagggagggagagtattaggataaatatttaatgtaggcggggtttaaaatttggatgataggttgataggtgtagaaattattatggtatatgtatatttatgtaataaatttgtatattttgtatatgtattttggaatttaaagtaaaaaaagtaataataataattttaaaaataaataaattaattaaataaaaatattttaatgttaataataaaaagtatcgggggttgtggtttatgtttgtaattttagtattttgggaggtcgaggtgggcggattatttgaggttaggagtttgagattagtttggtttatatggagaaattttgtttttattaaaaatataaaattagtcgagggtggtggtaggggtttgtgattttagttatttaggaggttgaggtagaaaaattatttgaatttaggaggtagaggttgcggtgagttgagattgtgttattgtattttagtttgggtaataagaataaaatttcgttttaaaaataataatgataataaataagataattgggttaggtgtggtggtttatatttgtaattttagtattttaggaggtcgaggtggaaggattatttgaggttaggagtttaagattagtttggttaatatggtgtaattttatttttattaaaaatataaaaaattggttgggtgtggtgatttacgtttgtaatttttgtattttgggaggttaaggtaggtggattagtggattacgaggttaggagatcgagattattttggttaatatagtaaaattttatttttattaaaaatataagaaattagttgggcgtagtggtatatgtttgtagttttagttatttgggaggttgaggtaggagaattatttgaattcgagaggtggagattgtagtgagttagattatattattgtattttagtttgggcgatagagcgagattttattttaaaaaaaaaaaatataaaaaattagtagggtatatcgggtacggtggtttaagtttgtaattttagtattttgggaggttgaggtaggcggattataaggttaggagatcgagattattttggttaatatggtgaaatttcgtttttattaaaaatataaaaaaattagttaggcgtggtggtaggtatttataattttagttattcgggaggttgaggtaggagaatggtatgaattcgggaagtagagtttgtagtgagtcgagattatattattgaattttagtttgggtaatagagtaagatttcgttttaaaaaaaaaaaaaagagtattgaagttttaaaggagaggataaataggttgtataaataattttcgtagagtagatacgtaatgagtgatttgaaatatttgttgggtatttaaattaggttaaaggaaagagaaatagaatgagtatatgttataagaattggagataagtaagattttttatttatatttttatttttagtttttggtatataatgggtatttagtttattgttaggtgaataggttgttgtggagaaaggtaaataaatgatggaaaaaattataaggggaattaattaatttgtatattaaatttttgtgataggaaatttatttttataataaatttgtttatatatttttgaatttaatataaaagtttttaggttaggtgcggggtttacgtttgtaattttagtattttgggaggtcgaggtgggtagattatttgaggttagaaatttgagattagtttggttaatatggtgaaatttttatttttattaaaaatataaaaaattagttaggtatggtggtgtatgtttgtagttttagttattcgtgaggttgaggtaggagaattatttgaattcgggaggtggaggttgtagtgagttgagattttattttagtttgggtgatagagtgagatttcgttttaaaataaataaataaaatcggtgagaagtttattttttaaattataaattttttttaaataattagaattgtttatttttatttattttgtatttcgtattttttttttttttatagtggttgaaagaatgatggggaagagaggaagaagaaattgttttaggtttttttttttttttagggtttttgtttttttattatttttttttaaaaattttttgtttttttttttttttttttttgagatatagttttattttgttatttagtttggagtgtagtggtatgatttcgatttattgtaattttttttttttaggtttaagttattttttttttttagtttttcgagtagttgggattacgggtgcgtgttattatgtttagttaattttcgtatttttagtagagatggagttttattatgttggttaggtttgttttaaattattgattttaagtgatttatttattttagttttttaaagtgttgggattataggcgtgagttattatgttcggttaaaaattttttatatgagtaggtttgttatagaagtaaattgtttgtcgtggggatttggtatatagattagttaattttttatgtaattttttttattatttatttatttttttttatagtagtttattttttttgagggaagagagagattttttcgtattgttttatattgttttatatttagtatttgttttaagaaaaaataaggaagtaaaattaaagataggtagtttggcgttaggtttaaaattaggtttgggtttgtttggtttaaatttagtagttaaaaattaatttatgatttagaacgcgatgttatttttagtttttagatattgtatagaagaatattgtgatattttttgttttgttttgtttttttttgattattagtgtatgtagtttttgttacgtattatttgcgtatttaaattaattacgatatttttatgtgaaatttttagtgttgtgagattttaaaagggatagaaattgtgtatttagggagtttggattttaaggtagtagtttgtcgatgttcgtagttgaataaagtttttttttttataattcggtgtttgaaaggttttgtttggggttcgttttgttatattttttggttttttgaataggaagcgaggtaattgacggacggttaaggtagttttttgggtggtttaggtttgttttgtggagtatttttgcggtggattttggttagtttgagtgacgcgatttaaagagcgttttcgggtaggaaatttttcgggtggaacgtttcgttagagtagtacgtagtaggttttcgaggaggattaatatattggttgaatattgggaaggaattggtatttggagttcggatatttgaaatttggtaagattagtttttggaatttgttttattttatttgagtggaagtatggtttgattatttatggtgtgtttgtattggtatttttattttggttttgatttgatttagattgtgtgatattttggttttggttttggttttgatttggtttgggtttttggatattttgattttggtttggtgtaaattgtaaaagtgtgtgtgttttgtttttttgttttgtagtgtacgtgtggtgtgagcgtggtgttttgtttcgaagaagtatgggttaggtataaataagtttattttattaggaattatgttaaaaaaattttttttttaagaaagaatttaagggagattacgatgttattgtgatattaggaaaatttagaatttgtgaaatagattggttagtattagaggtgggttggttattagaaggaagtttggataggttttttgttttaaaggtatgatataaagtaatttgtaagttaaggtatttagattagtttttgtatatagatagttatagttggttttagatttttttttttttatagtagttaagagaatagtagtataagtatttggtagaggtaaggaaagattagtagagagaaaaaaaggttatttatattaattttaagttaatttagattaaataaggttttattaatagtaaaggataattgaaattttaaatttataaggtttttaataaaagtgaagtttgttaaaaattaatagtataatatgtattatggtaatttttaattttgtggttttagacggtttagtttaaagataaaaaaaaagtttattttaaaaaaaaaagcgggggaggtagaatttatgtaaaaagagtgttatatggtaaatttttgttttgaaataaattaattggttgtttaaagaaaaaaaaatgtttgtaataagttagaaagttgagatatgttgaagaattgtcggcgaaagtcgtgaaagaaaaaattttataaaaaaatttatgtaaaaaatattgtgtaatttaaaagtaataaggttttttgagtattatttaaaaaaaaaaaatagtttatgtgtaaggtgtataagaaaagtaaaatatatttttggtaaaaagattataaggaggtataagaatgtggatttttatttatattaaaaggttaaaaaaattattgttttgaaagtgtaagtaaattttaaaatgttaattgtaaagaaaattttgtgtgtaaatatattagttaaagttaaaaaggtattatttagtttttttgtgaattggatattaaagtaaaaatgtgataggttttttttaaagtattaatttgttttttaataaaaattataaaaggttaaaaagagtttataaaattttattttatggttaaatatgaaaaattggataaatatgtttataaagttttattaaaattaagtttaatattaataatatattaatataaaggtaaaatttagtttatttggtataaaaattatataagaagtattattaaatataaaatggtgtttagttttttttggtttaaaaattaataaaaatagatgttaaaggaaatatttattttattagaggattatagaagttaaagatttaaaataaattttggtagttaagatagtatattaagatgtaaatgtttggttggaatggattaaatattttatttgtacgttaaataaaattaattgttatgtttgtgtatatggtaggttagagttttgattgttttttttttattaaggtggttttttagtcgattaggtgtgggttgtatggtagtttttttttaggattttatagtttggagtaataagttatgttaagttttttttgttatatttcgaagtttttgtgggttagttttcgagggttatttagtttttattttttaatattaagtttattttttgttttttacggtagggaggagatttagtattttttggagatttgaagggatgtagtgagtttaagagtttttaagagtttattaattagttagtttttgtttattttcgagaggatgtgtggtggtatcggggtggatttttattgggtattttgttgaataattagagtggtatttgtgttttagtttatttggttattttttttattttggtattttattaattagaggaaaaaaaaagtaagatattataaaacgagagaagttttttataggttttttaatttttatatttatttaaatgtaattggagttttataaggaatattagattaatttaaagtttgaaattaaatagttataggatttaagttaatattttagtagatgatagttaataaaaatgtagattagataaattatatttattataattaatagtaaagagttttttattagttaaaaagaaaaatttatgtcggttttagttttgaggttatttgatttgataaaattttttatattttgtgtgttagaaagagaaaaaatgatagttggagttttaatttagattgtagggttttggttaaggttaggggtttattttttaaaataattagacggggtttttaaaggttggtttttatgtttaagggttttggtagtaattgttttgttagtataagaagtagatgagttaatttttaggtaaaatttaaatagaaagtttttttatgttgtggtgattttaataaatattaaaggatattattagttaataaatgttagattaattagatattaaattttgttttgtgaaaatttttataaaattattgaagtttttaatattttaatttagttattttatttttggtaatagagagtttagttaaatataattgtttagaggtgttggatttagtttattttagtaggtttaattttcgagattatttttaaatattagtagattgggagttgtacgtggatgggagcggttttgttaatttttgtaaagtgattttgaagaaggagataagttttgttttagttatatttagaagttgattggtttacgtataggcgaagtatgaggaaatttattgcgggatttattttttttaaaatttggatttgtatagtaaggattttaattgattttttttagattgagaattgtttttagtatatatattaagttattgaggtaggataaaaattgttatagttttattattttatggttattataagtgtattaggattttaaaagaaatttgtttgtataatgttatttaaggtatgtagtttagggaataattaatttgatgtgtgttatgatttattttaagtttttcgtgattatagtttttaaaataaaattaaggattggtttttttttaggtgatataagtaaggtaatagttagaacggaaaaaagaggggtttttaaaaatgtaattttaaaatttggtgtttgtgtcgttattgatagtaagtagtatggaataggatgcggttttttaaattggaaaaaaaaagtgatatagtaaaaaaaaaataagtgtatttgttaagaattgtatttatgtgagatgtgttaatattggttttgtgttatttgggttatttaaaaagaagataaaaaagattttgtttggcggtttagttgttttgggtaaaaattgtataatggtattataaaaagttatatggtggagttttaattatatagaaagaaatttatttagtaaatttttaaagttgtagattgtttgggtttatttagaattttatcgggattggatagtttttatcgggttatacgtagagtttatgttaagttttttgattagtggataggtagttgtgtaattggtattattaagttatttttttttttattgtttataaaaataggtaaatttttgggttttttagtttatgttttttgcgaaaaacgaagtatagttataggtaattggaaagatgataaatgattttttaaaaaaattatataatattataggtttgttatttagatataagatggtttatgaggatatcgaatttttatttatatgtttaatcgaattatatggttgtaagttgtttagaaattattattaataaaattcgttaaattttgattgtttttgttcggtaagagattttgatgagaaatgttatttattaaaatagattagtttttgattatttgttatatatatatatatatatatatatatatatatatgtatatatatattttatttttattaaaaatataaaaaattagtggggtatggtggtaggtatttgtaattttagttattagggaggttgagttaggagaattgtttgaatttgggaggcggaggttgtagtgagtcgagatcgcgttattgtattttagtttgtgtaataagagtgaaattttatattaaaaaatataaataaataaataaataataaattaaataaataaaatgggtaggaagaggtttgaatataaaaatattcgattgtatagcgattaaggagagataatttaaattttaaattttttttttttttttgagacggagttttattttgtcgtttaggttggagtgtagtggcgttagttatatcggtttattgtaattttcgtttttcggatttaagcgattttttttttttagtttttcgagaagttgggtttataagtgcgcgttagggtttcgttatgttggttaggttggtttttaatttttgattttaggtgattcgttcgtttcggttttttataaagtgttgggattatgttgggattataggcgtgagttatcgcgtcgggttttaaattttaaattatttttttggggggacggagttttgttttgtcgtttaggttggagtgtagtggcgcgatttttgtttattgtaagttttgtttttagcgtttacgttatttttttgttttagtttttcgagtagttgggattataggtgttcgttattatattcggttaatttttttgtatttttttagtagagacggggttttatagtgttagttaggatggtttcgattttttgattttgtgattcgttcgtttcggttttttaaagtgttgggattataggcgtgagttatcgtattcggttttaaattttaaatttttaagtatggatgagttaaattattttttttattgttgaggagagacgtttgtttcggattggatttaatttaatggggtttaagaaaaagggaaagtttcgttttcgtagtagttttagtttaatgggagtttttcggtacgtttagttggaagatgggcgggattacgttggtttggagtatggtacgtgatttcgtcggtttggttgtcggaatttggatttgagcgagaagtacgattttcggtcgttttcgtttttgtatttttttggttttattgttgtgtttgttggcgacggttcgtttcggaagttaggttagtgattgcggggttttgtttcgttttttatatttgttaagtgttttttttttttataacgtttgatttttatagtttggtagcgagagtttagtttttcggggaggttgaggttcggtgttattattattattggaggtttgacgatgtttgacgatgttttacgcgggtgttgagtagtaggggggtttaattatttagtattttttttttttttttgagttataattttttttaaattgtggtttttatgaggttttttgggagtgttttttggagtcgggggaggtttggggcgatggaggttgtaagataaggttaggtttagagggtaggtagggttttttttgaaattggttgtatttggtaagtaattgttttatgttttttatttgaagtttaaatttggtcgtaggaggtttttatgtttgtaattttaggattttgggaggtcgagttgggcggaggattgtttggatataggagtttgagattagtttagggaatatgaggaaaatttgttaatatagaaaatataaaaatattagttaggcgtggtggtgtacgtttgtagttttagttattttggaggttgaggtgggaggatcgtttgagtttgggaggtagaggttggggtgggttttatgattgtgttattgtattttaatgtgggtgatagagtgagatcgtttcgaaaaaaaagagaaaaggagttaatgatagtagttatgtttgttaaaaaaaaaaaaatatatatatgtatatatatatatatatacgtatgtgtgtgtgtgtatatatatatttggagacggagaattatttagtcgtttaggttggagtgtagtggtgtaatttcggtttattataattttcgttttttgggttttagggatttttttgttttagttttttgagtagttgggattataggcgtgtattattaggtttagttaatttttgtatttttttagtagagatggggtttcgttttatcgtggtttttaatttagttttaaaaatatatttaaatataattattaggtgtgttttttggtatgatttttaattttttgagattggtgtaatttttttatatatgaagaatgtggtttatatttttgtttataagagatggttttaagagggatgtatagttatagataagtggtagggtgagtgttatttttgagtgagagttagagtcgtttttgaaataaaggggtatagtagcgtggtagatggtttgaggttagggtaagggtttaatgaaagggtttaagtggtttaagtggtgtttggagaagggaaggatgggttttttttttaggggattattttaggaaggtattgggaggtggaattgtaggagtatggaggtgttttaatttttttgttttaagtgggttaggtgaaggtagggtgtggtgggagatgagggtggagacggtagtttttaaggggttttgtttagtttgttaaggagtttggaaattatttcgaggataaaaggggaatttttagaggaagagtagagaggtatgcggtttgatatgtatttttggatagattattttgattatattaaggaggatagattttatatgtttaagattggagggagagagattagttagaaagattttggttataatttaagtaagttatattatgggttggtttggtggaggtagaggaatgtttagattggagaaataggaagttaaaaatgggtagggtttgttgattgtttgaaattagggggtgtgaagggaggtagtattttaggataaatattagatttgtcgattgtttgggaatatttaattttgttgtagaagataggaaaataataaatttaaaagaagtgttatatatagataattaaattagttatttgtagatagtataatatattcgtgtgtatagagattaaaagggatagaaagattaaggaggtattaaatatttacggtattttaaatacgtgagatatgaggtatttaggatgtaggaggttttaatttgataggatggatgtatattgtatgatttatagtttagttggtgtgattattttatttaatttgttttttttttcgtgtgttgatttattttagtatttgttttttgttttttagaatgtgttttatatttatttaataaacgatgttatttgagtatttatatttggtttgtgagtttttttgttttatgattttttagtttattttatgttattgtgttaggaggttatatgatattcggtagttgtttatattttaatttagttttggtttgagtaagtaggtaggtgagaggatgatgttatttattaggaatataggatgagaggtaggttgttttatggttagggttaagaggaaatatttagttttggatgtgttagatttaaggttatatggaattttaggtttagatgattaataggtaggtagttggatatattaatgtgaagaatagggatgaagagatttgggagttattattatttaaaataatgagtttagatgaggttttgtagggaaataagagattttttttttattgtttagtttgtattttttttatttatttttttggtgtttttaaaaatagttatatagttttattatataggtattttgtgtagtgttttttaggtaagatttttgttggaaaataatttttttttattatttttttttttttagtaatttattttttgtgttatgattttattatttttttttagtttagttttggtaagttttttacgaagttttaggttatttggatgattatttttttttatgatgttgtaaggagggtaggtggtagagtttcgtgtattttgggtttaggttagggatttaagagtttgggagaagttggtttttagattgaaggttagagtttagtattttgttattattttggggagtattatggtatataataattagagttaaggtgattgggtttgggggtttaggaggaggtagaaaagagagaagagtttaatatgggtttgaagatgtgtagttgtattcgttattgtttagttaagatgtattgagttttgcgtggggtattgtgttaggtatttagatattattttattttattgagattttgatgttatttttttttgtttgggggagtttatttttgatttaaattttgttttatgtatttagtggtgttaaaaggattgggttttaggtattagtaagagtaggatagaagtataagattttttggttgggcgcggtggtttatgtttgtaattttagtagtttgggaggtcgaggtaggtggattataaggttaggagatcgagattattttagttaatatagtgaaattttgtttttattaaaaatataaaaaaaattagtcgggtgcgttggtaggtatttgtagttttagttattcgggaggttgaggtaggagaatggtatgaattcgggaggtggagtttgtagtgagtcgagatcgtgttattgtattttagtttgggtgatagagtaagattttgttttaataaaaaaaaaaaaaaaaagaagtataagatttttatttttttttttagttaaggattaggtttttaagaaagaagttattgtttttaagtttttaagttttttttttaggtgaaaaaagtttgttatttttttgtttttgttgtttaggttggagtgtaatggttcgattttagtttattgtaaatttcgttttttaggtttaagcgatttttttgttttagttttttgagtagttgggattataggcgtttgttattatatttggttaatttttatatttttagtagagatggggttttattatgttggttaggttggttttaaatttttgatttcgtgatttatttgtttgggttttttaaagtgttaggattataggcgtgagttatcgtattcggttaggtgaaaaaaatttatttaatttttttaaatttaggaaatgggaaaaattggtttttttttgatatttatttttttcgttattattagtagttaataagaaatttggtgatttgaggaaaatatatttttaattaatattatttttttttatttagtaaatatttaagtttagtaagtgttgtttattttgttgttattaataatatattttataatagtagttattagtttttgaattttttttggtaggttttatattaatattggtaaggattattttatgttatttttatttgtgtggtagagattataattgtgtttagttgttaaatgaggaaagtaaggtttggagaggttttattatatttgtcgtgggtatatagttagtagttgatgtgtagattagggatttaaatataatgttgtttgtgttgggtttttaggagggtgggtgagtatatgtggttgaatagtgtatgttgggtatatgggagggagttatatgttgtaggggagggagagcgggtgtagtgtgattttggtggggatgtggttgatagagaagatatgttttggagaatgagtgagggtttattagttagagtaagggaattttatgtattttgggaggaggtaggagcggaggtggagagagttattgttttgattttttgtaattttggagttttggggttttggttttttagagttatatattttttagattacggttgtttgtgagttgttggggaatcggagtagttggggatattggtattataattgtgatggttaggattttttttttagtatatttgagttttttaattttagtaaaagttagttagaattaagtagagttgtagaaggagagaagggaaggaaataattttttttgatttagagttgcgtttatttttttcggaaatatttgaaagttggggtgggattacggtttatcgtaggtgtgataggtgcggattggtttatgtggggaaggtggaggagttgagggtattgtgggagggatggagtgtaggttttttagttagtttttaaaattttattttaatatttatgttttaaatgaatatagttttgttgttgatcgttttagttattttgttttttttttttttttcgtgtttggttagttttttttttatttggtgtttaagttttgatttagggttgagtatttaagggtttttaaggtggggtattatttatagttattatggaatatagtggaatggtgtttaaagttttggtgtggaggatgtacggtagtttgataggattagaggtagttagtttgtttgggaggtttttgttattatttttttttgtttcgttagtttttttggtgtatgggattttttgtaaagtttttggagaggagttattttaatatgttaggtttttgatttttattttttagtgtttagttaatttagttgagggatgggttgttttagtttttgagtttttggaattttaagttatttgtttttttgtatggcgttgtttagatgtttagagttagtagtttgttgtgatttttttgacgtgagtataggtttttttgtttggtgatgtattaggttgatgttgagtttttgtgtaattttagatgagtagttggggtttggaggtatgtagtaatgtagttgtcgagtgtagtggttcgattttagtttattgtattttttgttgtttgagtttaagcgatttttgttttttagttttttgagtagttgggattataggtatgtattattatatgtaaaaaaaataaaataaataaataaaaaaattattttttggtatttttagtagagatagggttttattatgttggttaggttggtttcgaattgttgatttgaagtgattcgttcgttttagttttttaaagtgttgggattataggtatgagttatcgttttcggtttttttttatattttttgattaaattttaggggaaaatttgttagattttttaggaaggatgtttggaggtaggtggtagggtatagggaggtttatgttaattttttattgaatattatttttagtttttttatttttatttttttttataggtgtgtagagaagtttatatttttatgttaagtaagtggggtgggtagatgggagggtatatgagagcggggtagtaattttatgttttagttggaaggaagtttagagtttattgagtttaaattttttttattaggtgaggaaattgaggtataggagggggaggtgttattagttagggagttagagttaggatttagaatttggtttatgttttttagtttgtttttgattaatttttttagtttatttattttttttgtttttatttttgattttttataggttatagttagagagttgatttttttatttgaggtaagagtgtttggatttgggataaggtgattttagtttgtaggttttatgggggagattagagggttttttgttgagaagaggggatttggtttatagtgagtaaaggaatttgtttaaattgttattaagggagattattttttaaggtgggttaagtttgaatttttagttttttatttttttttttttttttgtttttagattgataggtttcggaagttaaaataagtggttttttagatcgggtcgagagtaagtttttattggttttaattgagtttttttagttggttttttaattaaatagtattttattttttagtgaggggaagggaaggttgggttgagagtagtaaggttgtttattttatttttttttatttagttatgttagtcgttatatttggtggggagaggtgggttttatttgggttttttggtagtgttttgtgaagggttttgatattgtattgtaataataaaggtgtgtgtgaagtatttttttatggtgattttttaaaatttagggaattatgggattagttttgatgatttagtttggtttttagttttttttaggtttaacggtggtttttagtattggttggggtttgggagagttggttttggttgaagtgaagttatttattttttaggtataataggatagtgagaaggaaggaaagtttgttttaattttttattagttttgagtattttagaagggggtcggttaggagtttaggtatgtaggaggttgatttttgattgggtttatatttagttataaggtagttagggatttaggtatttattttttgtttgcgtttttttcgggaatgggttttttgtttaggttagaaatatattatttatagtataaattataatttaaaaataagagggtggtgttgagtggggaaattggggaaggtgttttaggagttattaggaaaatgggtagtagggattttttggattggtttgggaagagcgtttttggggaatttggaggatggtaagttgagaaatattggtgtggagattttagttaaattttaggtttgttttttttttttttttgagaggtcgtttttttggtagatagtagagagatgtatgataaaggtgtcgtgatggttttgttttggggattgagatggttggggaggggtttttttttgtttcgaagtatgttttttttatttttattaggttttataatttatttgttttttgggtagttaaaggtcgagaagtgaatatagttgtaattttattgttttgtagatttttcggtagatttgtggtaggtattgaaatgtacgtatataattaggtttaaaaagtttatatagataggagatgggtatacgaatagaggtaatataagagtgggggaaaagttttaaaagatttacggatgttattaagatgaagatagttggttacgggatatttatttttttagaaggtagatagagttattgattttagtagataagtttaggtagggttgagtttggagtttgtaatgagaagttttatttaagtcgatagaggttagcgtgtttagtttagatttggttttttggttttcgaagttgtggggagttttggtttagagttttttttggagtttttagatttattttaggttttttattgagattaagttttgggagtagatagataaatattattttttatagataggtatttcgttggttatttttttgtaaatagaattaagtattagattagtagtatgagttttaggatatttaggttaggtttagaaaaatagattttgaaggggagtttagggtagtttttttgtatttttttataaattattcgttattttttttgcgtttttttgttagttagttttattaaataaagtatattttttaatttttcgggttcggggagggatgtacgatgaagttggacgtttgagttttttagaggaaggaggaattagatatttaggtttttgtagggggtttttggtgttcgtttgaggtttagtttttgaggggattgtagaggggggttgttggagttttttttagcgtttttgaaggggattttgtgtgaggggattgggattggggggttggggagtaggaagtagtttttaggggagttatttaggtttatttaagggttgagtatttgtttagggttagagttgttttttttggggatcgggattgtttagttaaggttattgttttgttttttttttttagttttttttaggtttttttgaatttgaagttagatattttttttttatattttttattttttggttttttttatttagggtttagggttggaggtttgggttagggaggtgggggagggagaacggggtttatcgtggtattagatgtttgagttttggttgagaggggagtaaggaatttgatgtgtaggttttatagtggagggggtttaaagcgggtgttttattattttgttttagtaaaggttgggaaattgaggtttaattagtttaaagtttggttttttgaaggggaagtaggggttaattttttagtttgttagatgaggagagtttggagtttgattttggaagacggaggggtggggggatggggggtggggggatatagtacggaggttttgtttggtagtttatttttgaagatggggtgaaatttggtaggttgggtagatggtgttaggtatttaggttgcggggtggttggatttggttagtatcgggatgggaatgtttaggattttggatggatcgggggaaggtataagggagtagttggttattgtgtttatggttgttgatgtattgagggatagcgttatatatatatttaataaatttgaggagttgagagggtgattggtttttgaaggtatagtgttagaggtttgtggagagggggttaagtatttgggtttttgaagaatatggaggtgtgggagtgattttagatagttgggatgtgtagagtttgagagagtgttagggagcgggttgggagttgaaagttgggtgtggtggtttacgtttttaattatgatattgggcggtagaggcgggaggattttttgaggataggaatttaagattagtttgggtaatatagtaaggttttatttttattaaaaataaaaaaattaatagggtatagtggtttaagtttgtagttttagttatttaggaggttggagtagaaggattgttttggtttagtagatcgaggttatattgagttattattgtattttattgtattttagtttgggtaataaagtgagattttgttttaaaaaataaaaataaaaaaagtttttgtgggggatttgtattgaggttttggaggggcgttagttgtgtttttcggttttttttttttatagatattattgttattattattaggtaaatatttttcgttttagtttttttttttattttttttttttttatttatttagggggcggggttagaggttaaggttagtgggtgggattggggagggagagaggggttgagtagttttttcgtaagtttttattttattaggttttcggtttggggcgttttttttttttatggcgggatatttggttttagattttgttttttcgttttttttaggtggtggaggtgatgggttaggggggtcggagtcgggttgggttgattttcggatttggttaagtttttaaggtttttttggagggttaggaatcgggtcgggggttgggttaggttttgaggtgtgggggatttttttatgtttttcgtcgtatgagttttgtggggggatggcgtattgtgggttttaggttggagtggggttagtgttttaaggcggtttggagattttttagtttgagggcgaagtaggagtcggggtggagagtaatttcgatggggttttttcggagttttgtatcgttatttttggtgtcgtgaagttggagaaggagaagttggagtaaaattcggaggaggtaagtgagtttcgacggggttggggtgtggggaggtggttatgatagggtagtttgatggggaagtggttatttgtagttgtttagatttggtatttaggagaggagtaggtagggttagttgttttggttagggaggggtgtgtattaattgtaggtagttttggtaggtaggggttaggtgggaattggaagttggatttcgaagagataattgtaggtgagggtagagcggtttgggagagtcggaagttggtttaggttggtttttgttttgtttggtttagtttttgttagggttttttatattttttaggtttgtttagggtttggttatttattattggtttagtattagatttagtttggggttggtttgagtttttttttttatttttagttttgtttgaaaatttgatttttattagatttaagattttggttttagggttaagtatagtttgagggtaaaaatagtgtttattttaggattattgtttttgaaagtttagggtgtgattcgtttttgataggattttttgtttgggttgtgtgtgtgcgcgttgtgagttgggtttatttttagttaagtatagggtttgtttttttcggatttttgttttaggttaatgattggttattgtgttaaggtgtatattttggtattttttgtagaaagttggattttgattgattttagttttagttttaaagttgtaaataagaaaaatggtgagagatttttttaggttatttgtaaatatagagttgttgcgggattgaaggtatttagttttgttgaggattattaaagatgtattttttagttttttaaggcgataagtgtaagtaattagagattaaatattaagttttgagattttatagaaaggtgtgattggtttttggagtgatcgagaagttttaattttttcgtaggaggttattgttgagttttgaatgataatggttggtaattgtggtttattttttaagtgtttggttgtgtgtttcgtttatatattattattttattaattagtataaaattttttagggggaggtattattattttatttaacgggttttaattgttaaatgatgaagcgaggatttggattagtgtttattttaaaattttaaaatagaatttggaaaatttaggatagtagagggtatttattagtttgagttattggttgagtagaagttggggatgaaaatagtttatttgaaattgatatgattaagtattattgaaatatttttttgaggttttaggattataaaaaggttttgttttttttttattagttgtgtatttttgttcgtcggtagttttatatggtatgttttagggtttagttttttaatttttgttttatttatttttttttttttttatttatttttaaggtttaaatgttatttagatattagatgattatcgcgttttttgttttttgtgatggttttttgaattgttttattttgattatttagttgtttaaggttaaatttagttatttttagttttttttacgttttatattttatttttaagaaatattttgaattaattataatttaattttggttttagttattattatttttgttgggattatcgtagtagttttttaaattatattgttttttttttattgtttgtggttaatacgttaattagagttagtgttttaaaaggtgtggttaggtattttgggaggtcgaggtaggcgaattatttgaggttgggagttcgagtttagtttgattaatatggcgaaattttatttttattaaaaatataaaattagttgggcgtggtgacgtatgtttgtaattttagttatttaggaagttgaggtaggagaatcgtttgaatttgggagatgtaggttgcggtgagtcgagatcgcgttagtgtattttagtttaggtaataaaagcgaaatttttaaaaaaaaaaaaaaaaaggtgaggttaggtgcggtggtttatatttgtaattttagtattttgggaagttaaggtggatagattatttgaggttttttgattagtttggttaatatggtgaaattttatatttattaaaaatataaaaattagtcgggtatggtggtgggtgtttgtagttttagttatttaggcggttgaggtagaatagtttgaatttagaaggcggagattgtagtgagttaagattacgttatagtattttagtttgggcgatagaacgagatttcgttttggggggggagaaaaagggtgagagattattttatttggattaaaataaagttattatgtttgtaataggatttatttagttattagattagttttgggttttggaaggtttattttagggttttgttatattagatttttgttttttgtttaaataattattttttttgtttttaaaagtgttatttttttttataattttttttttttttttattttatttttatagattgttttattttttttttaatttttgagatggagttttattttgttttttaggttggagtgtagtggtgcgattttggtttattgtaaattttattttttaggtttaagtaatttttttgttttagttttttgagtagttgggattataggggagcgttatgatgtttagttaatttttgtatttttagtagagatagagttttattatgttgattaggttagttttaaatttttgattttaagtgatttatttattttggttttttaaagtgaagggattataggtatgattattgcgttcggattgttttgtttttttttataatatatatatattttttaaatagaggtagtaggggtgggagaaggggcggtacgggttttattatgttatttaggttgttttttaatttttgggtttaagtagtttgtttattttggttttttaaagtgttaggatttatagatatgagttattgtgtttggttattttttattttatttatttttttattttttagagtaggagtggaagtttattattaaaaagttatagggtagggaaaaaaggaaagtgtatttggaagagatttaagtgggtaatttgaagaataagtgtcgaatagtatttttgttatgttggatgttagggttttttgtttattttgtatagtcgttggtttatagaaggtgttcgataaattttttgaatttaaaaattaattaggatgtttttatagtgaaaaagatatagtaaagatgagggataattaatttaaaaaatgaggagtaagtatatataaagtattttatttatttttatgatatttgttatttttttgttgtgtttgtgtgtatgtatgttatgttatagtttgtgggatttttaaagtaagttggggagagtatatattgaatttagtttttgagatatgatgttttttttttttaattaatttagaatttagtagtttatttatttttttaattttaaaatatttttaaattgggggtgatatttgagtgagagaattttgtaggtattaaatgaattattttttttttttttttttttgagatagagttttgttttgttatttaggttggagtgtagtggcgtgattttagtttattgtaattttcgtttttcgggtttaagtgatttttttgttttagttttttgagtagttgggattataggtgcgtgttatcgtgtttagttaatttttgtgtttttagtagagacggggttttattatgttggttatgttggttttgaatttttgatttcgtgatttgtttatttcggttttttaaagtgttggaattataggtatgagttatcgcgtttagtaaagaatttttaatttttataatttgataggtgttttttttcgaggttagggtttttttttttgtttttttattatgttttgtattttttggatgtgttagtttttgggggaagagtagttttttgttatatgtatgagttagtgaatagggaatgggtgaatgatatttgtgggtaggttatttttagaagttaggtgggtagtttggaaggtagatgtatttttatagattattttttggggttatacgtaggtttttgaatttcgaatggaaaggggagattgataattggtgtgtttatgtttttataagttttttgttttttaaaatttagttttaggatattaaagttttgtagaaagaattcgagtaatttgttaagtttttgaagtagaagaggattattttgggatatatataggtcgatgtggggtttattttgggggttttatttggtgggtttttttttgtagattttgatcgtattttttttttaaggagtatttttgaatttagtggggaggggtaggggtagattttatttttatttatgaagaggagtagggagagggagaagatgtttgggttttgagttttttttgggaagaggtggtaagtttggattttagggttataagggttttgcgtgtttttttattttgttttttttttgattggttttttttagggaaggtatttagttaaacgattatttgtcgttttgaggttttgtagtttagttttaagaatatgtgtaagttgcggtttttgttgtagaagtgggtggaggaagttgataataatgaaaatttttaggaggtaagggtgggagggggatattcggggatttttttttttttggtttaatttttattgtttttattattggttcgtagtttttcgtttttggtgtagtggtttttagtgggatggagtgaaattttttagttttgttgggataaggtttagagttaatttttttaggattttgtttttttatattattatttggttttgttgatatatttagttatagatttttgtgatgttgttatttagtaagtttaaagtttgtttttgttattttttttttatttgtatagatatgtaaagtagaaattttcgtgtaggttcgaaagagaaagcgaattagtatcgagaatcgagtgagaggtaatttggagaatttgtttttgtagtgttcgaaatttatattgtagtagattagttatatcgtttagtagtttgggttcgagaaggatgtgagtgttatgtttttttgcgggttttattttttttttttgttattatttcgttttttttagttttggtttttttaattgttttagggttgttggttttggatagaatgtttaagtagttaggtttgttttagtttattttttaatgtttttttttaattgttttagggttgttggttttggatagaatgtttaagtagagttaggttcgttttttagtttattgtttaatgttatttttttttttgttatttattggtaggtggttcgagtgtggttttgtaatcggcgttagaagggtaagcgattaagtagcgattatgtataacgagaggattttgaggttgttgggtttttttttttagggggattagtgtttttttttttggttttagggttttattttggtattttaggttatgggagtttttattttattgtattgtatttttcggtttttttttttgagggggaagtttttttttttgtttttgttattattttgggtttttttatgtatttaaattgaggtgtttgtttttttaggaatgggggatagggggaggggaggagttagggaaagaaaatttggagtttgtgttagggtttttgggattaagttttttatttattaaggaaggaattgggaatataaagggtgggggtaggggagtttggggtaattggttggagggaaggtgaagtttaatgatgtttttgattttaattttatattatgtattattttttttttaaataaagaagtttgggatatagtagatagatatatttattttggtttgttttttagttattgaggtggggatgggaatatttaatgtttatatttaagtgattttgaaattaaggtgttatttatattttttaaggttatataatattagagggagagttgggattgtagttaagtttatttgtatagggttttgtgataggttagtttttaaaagtttgtgatgtaagaatttttgtttatagatttagttattatgtagttgttatttgtttagagttggttttttgtttttttattttattttggaatttttaaatggttttatatttagaaattattttatttttgttgaattttgattattttaattagaaatttttattaatattttgtgtttttttgatattagggtttatttggtttttatttaaggtttttgtatattttgtttataagtgatttattagttatttaagttttatttttggttttgttattagtttattaggggtttttgttttagagttattttttttatgtaaaaaaatttgggtttattaaatttaggtaggaaagggcggatgtggtaggttttaatagaataggttaagataaggttttatttttatagaaatgatgttttgataatagtttggtttggtgtaaggtttataaaagaaaattatatgtattatgtgtgggttaagcggtttgatttatattgaattaggttagtttagttgttttttgttgtgtttattcgtggagtggagttgtgttatagttattatattggtaaattgttgtagttggtttattaggtttttttttgttttgatagtataggtgaagtttgtaaataaattttttgttatttttgtgaatttaattaaattttagttattttatttaaatggtaatagatttgtttttttttaaattagaaattttaattatttgtatttttatttttagtttaatttatatatttgtatttttttagtaagtaggtttgtatttttattttttttttttttttaagattttgaattagttttttagattttgttaagtatattttttttggaaagtaaggaatattatagatttataagaagagtaaatgtttaggagtgaatgaagcggtttgtttttgatttggaaataaaagtaaagttgtgaaaagttaggtcgttacgattttgttggtagtaggattagttatagagtagggaagttttggggttaggttttaggtttttttagaatgttttgggtgatgttattaagaattttaagaatttttttttatattttttatcggttgtaggtatggtttttgtaattgataggtgttttgattatagatattttggtgtttatggtaatatggttttatggtttgtaatagtgggaatttttagtttattggtaattttttggaggtggtaatatttttggtaggaaattattttttttgttttggttattagggtttgttttaggttttgaatgagtttatattaatttattttttttttttgtagttatttttttttggggagggaagggaaggggggtatttattagatttatttgttcgttgttgtgtttatttatgggtaggtgtgttcgatggtgttttggcggtggattttaggtttgaatgttagttcggtattttgggtatcggaagtcggtttttttggtagtttggatgttgtagttaatataggttatatggaattagacgttatagttattatattgaatttaggttattgtttttttttggggtaggtagtaataaggagttgtatagggtttttcgtttttaattgtagggggagttatgggagcgtttattgggtattttcgaggacggttacgtcgatttttgaaggaagtgatatagatataagggttatcggaaatttgtaggagaaggtttagattttgttattttatggttggttatagggtgaggttatagaggtatagtggtttgagaattaaggtgagtttggattttgtttttaaaaatatatagggtgggtttaaaaatttttagtgtgagtttgaaagttttttatttttaggtattagaagaatggggttaaagttatatgaatgtaaaaagtaggatatgtttatttcggttgttttataagtattgttttattttattttttatgtttttttgtatatatttttttttttttattagagttaatttaggttttgttattttatttattttatttttcgtgtttatttttttaggtagggggatttttttatagtttagggatataaggaatcgaaaagtagtaaaatattgagagggttaagtgaggattttatttatttagtgggagttagtggggttttgtttatacggagtttttttttgggttttataaggatcggtggcgggtttttaggaggtttatttttattatttagtttcgttaatattcggtgaatagatttttttcgattgcgttggggtggagtagaaggcgtggtttttatttttttaggtggggcgggaataggtaggttttttggtttattttaattaggggagaaggtgaggggttggggtcggagtttgttgaggttgtttatggagtttaggattagtgtggttttgggggtaggggagaaggtgttgagaggtcgttgtggagttttttgggagggtagtataggtcggaaattagttttaattcgggttttttttttagatcgtgggatggtaatggtagtaaagttttgaggtttgattcgtatttgttggaatatgaagtagaatttcgaggggttggtttttgggggttttttagggttaaaggttaggaggtttttattatttaattttagtttgtgattttttgggagtcggatattattgattaaagtatttgttgatggtggggtattaggtaaatatggaggataaaaatagaaatgattagagttaggagtggagaaatttgtatgatttttggggaagaatatgaaattgtagttagatttttttttatattttaagttttttagtaggtgataggtattaggtagtatattttttgttagttaggaataagtttgtgttttttgtgtttttttataaaggatttttgtttttattgttttaaggtttaattttttttttttttttttttttttttttttttttttttttttttgagatggagttttgttttattgtttaagtttgaatcgttttttaggtttaagtaatttttttgttttagttttttgagtagttgggattataggtatgtgttattacgtttggttaatttttttatttttagtagagatagggttttattatgttggttaggttggttttatatttttgattttttgatttgttcgttttagttttttaaagtgttgggattataggcgtgagttatcgtgtttcgttttaaggtttagtttttaaatatgtttatttttttttagttttagttcgtttagattttagttttattatttattagttatgtgattttgggtaagtttttggtttgtttgtttgtttgagatggagtttcgttttgtcgtttaagttggagtgtagtggtgcgattttagtttattgtaattttcgtttttcgggtttaagtgattttgttgttttagttttttgagtagttggggttataggtgtacgttattatatttggttaatttttgtattttttttttagtatagatggggttttaatatgttggttaggatggtttcgaatttttgatttcgtgatttgtttatttcggttttttaaagtgttgggattataggcgtgagttatcgcgtttaggttttttttaaaaaattaattaattttttggtagagataggtttttattatgttgtttaggttggtttcgaatttttgagtttaagtgatttattttgttttagttttttaaagtgttggattataggtgtaaattattatgtttagttttggataagttttttaatttttttgtgttttatttttttttattgtaaatgaggataatattagtattatttatatttaatatatttaaaatagggtttggtttataatagtaagtattagatgaatgttggttattatagtttaataattataatatttttatagttgattttattaagaggtagtggtaaaatttaaatgtgaatttaggttttttgaggttaattgttttaagttacggagaaagatatgtttagattattaaaaatattatttaatatagaattgttttaatttaggaatagagtgttttagtaaagttggaaattgaattaagtttaaatttggtttttagtggttttagaatatttttattgtgatatttttttgatgatattttaggttttgtatgagttaaacgggattaaaaagggttagtttggtagagagtttttgattgtgtatatttttggtgggaagatgaaggtttggattacgattatttatttaatttgatgggagtatgggaggtaggtagtagggttttgtggagattttatttattttagtttggcgttttaattatttaggggtaaagttgttttgtttaatgtttattttggttgttgtggttttttaggttgattttttagttattatttcggggttcggtatgtagttcggcgtggattttagagatgaggttaggtttttgttggggtcgtagggttatattatataggtcggttttgtggtttaagcgataggtgtagttagtttcggcgggggggtggaaggtgtagagattatcgtttttgtcgttttttatgcgtagtagttggaagtagggtagtatgggcggtgttttttttgtattattttttttattttaggtatttatttttttttttatttttgggttacgtatcgttggtttaagttcgttttttagtttgatgtaaatttgagttgtgttgtatgcggttttaattttgagtatattatttgaatagtttaaatttagagtgtaagtagtttaggatttaatgtaaaattggttaagtcgatttgtaaatgaaaaattttaggaaggttttcgtgtaatgtaaatttaggaatacgttttatggtattttatttgagttggatttttagattataaaatatttggggagtttttaatttgtaaggtaaggatattttaggtagtttttgtgtgtgtcggggtggcggggcgcggggaaggaggttttgttatatatacgtttacgtgtaatacgaatatattatttttgtgtaattcggagaagagtagtttttttttgttaaatttgtttattttaatagagtatttttgtttgtttgcgtttcgattttttggttaattttttatttataattggttgaattttcgagggtaatgaatttattgttattttttaaaagaaagtgtaaacgagtttttaagtattttaataaattggatttaaatttttatttttcggtttttttaggtgggataaaaataggaaggagtttttcgcgattatgtaaggtatattcggtttttttttatttcgttttagtttcgtttcggatttattcgcgcggcgtagttttcgagtagttttttttttaagtagtgttagtttgtgcggcggatttcgggattttttgggtttttcggtaggagtcgacgttgttgtatttgtttgatagttaagaagtcggggttaggaggggcgcggtttttgcgcgcgggtagcgtttatttttttttcggaattttcgggttcgaatttcgcgtcgagcgagttcgttttcgtgtcgttttcgattggttagtttatttgttttttttcgcgttattggatagcgttttaagatttttcgttttttattttttttgattagtttataagttttttcgggttgtcgtagtgaggaggagtcgtttgggcgcggagatgtttcgacgtatttagtgggtttaaatttagacgttattgcgtttgcgtatatttttttttttttttttaatagagtgaaataggattttagggcgttcgttttgcgtaggcgcggttaggggtagaggcggggtcgggagcgaggcgtagggggtgtggttaaagcgtagtagggggttttcgcggttggtaagggacgttcgggaagagtcggttgggggcgggaaggggttgagcgggggttttgggagggtttaaggggtttaaaggggaagggggtataggggttaggtgaagggatagatgaagagattagaatagttttagagtttacgggttaattgggtgaagtttcgggtatttaggggagtagtggtgggagagtagagtcggttagcgtatagggggcgagggtaggttattgagagatgggggtgagggttaggattagaataatttttttagaaaaaggtagattaggttgtaaaaagggacgggagtagggattttagattcgggtaaaaaatagattaatgagggtgggagggtgggaggaagatttttaagtgtttattatgtgttaggattcgagaaagaggaggcgggtagtaggtatggaagttaaggggatagtagagagaagttgagagaatagtcgtaggaaagatttgaataagatgttaggacgttggtttttttgtttggggatttaggcggtttggatttttaaggttttggggagggtttagttttgtatgtggttatatttagttggggttaggttttgggttagtattttaatagggaaggatttaagagttatggtttgttggtgtttggatgggttttttttaggttttgttgagttatggagagaattttggagatggcgtttaagatttttgtattgtgtatttttttttttatttttggttaggagtagtagggattatagaaatttaaggaggagggtaaaggtattgtttagaattttgaaagtatgagtaaagttttagagttttttttagtttgttttttttagtaaattttttttatttgatagttagttgtttgggttttatgaggaattaggttgagataagtaagtgaatttggggtattttttattttggggaagtaggaaaagagttaagtatcgggtggatttggttataatttaaggattatgattttgttattgtaggggttttttttttggaaggtggtttgaaaattgaattggagtgtttttgtttttttttttgtttaggggaatatagatggttgaagatagaatttagagtttttaaataatgtggagatgtttttatttttaggttagtgggattagataaggggagtggtggttgtttttgtttgggaaattgattatttttgtttttgtaattttttaggttttattgggttgattttttttttttatttttaagttcggttttttttaattttgttaagaatggtttttatttggtttttagatatttttttggtttaatttttaggttattaagatgttttagagaggcggttagatatttagagattttaagtgattatgtgggaacgggatgtttttagtgataggtaggagttagggcggagaggtaggtagggatttatttacgtcgtttttttaggtttgtttgttagtgatttttttttattggaataaattttttattttatttcggttttagtttttagaacgtatttatttttatgtaagtaattagtttttatagtgtataaataataaagtagtgtgttaagtgttagggatgaggataataatagtgaataagataaattttgatttaaatttgtaattaataaggaatttaaaattttaagaggggagatagattgattattagttgatggtaaagtatggtatgaggtaagatgaagaagtgtaaattagaggtagagatttagtattgtggtagtgtgggtttattttgatggaagaaagtttttatagaggatatgttgtgggagttggttatgttgtcgtattatttgtaaatatttttatttttgttttatgtgtttttttttagatgtattgggatattattttgttattttgttttagaataggattatattagaagaagtagtatgatgaagaaggaatattagattgggtgttaggagatagagattttatttttagtttggttattagttagaggatatttggtaagttatttaatttttttagtttatagatcgttgttattaaagaaaagaaagaaagagcgagttagatatggcggtttatatttataattttagtattttgggagttgaggtaggaggattatttgagtttaggagtttatgattagcgtgggtaataaagcgagatttcgtttttatagaaaataattagttggttgtggtggtatgtatttgtagttttagttatttaggaggttaaggtggtaggattttttgagtttagaagttgaagattgtagtgatttatgatttagttattgtattgaggtttgggtgatatagtgatattttgtttttaaaaacgataataataataattttttatagttttgggttttagagagttgttttaggagttatgttttaagttggattaaattttacgtgatattggtagacgatttttttaaaggttggtattgtgttatttatgtattgtttttttagattttttataaagtatatttaatatttaataaatgttttttttttttttttttttttttgagatggagttttattttgtcgtttaggttggagtgtattggggagattttggtttattgtaagtttcgttttttaggttgacgttatttttttgttttagttttttaagtagttgggattataggtatttgttattacgtttagttagttttttatatttttagtagagatggggttttatcgtgttaattaggatgatttcgattttttgatttcgtgattcgttcgtttcggttttttaaagtgttgggattataggtatgagttatcgcgtttagttaataaatgttttttaattagtatttggttttattatattgatattggaagtttacgatttttttatgtttattttttttttaaattttttgtttttaaattagaattgagaagtttttgtgtgtttttttaatttttttatttaaaatgtgtggtttaaaaataaaaaaataaataagataaaaaaattattaaaaaataaaaagaatgtgtggtttaatgatatatatatttgatgttgaatttttttgtatgtagttttttttagggagattatgttttacgattttagttagattttaggttttgtgagtttaggtattggatttaatatgtttaatagggttttgatgaatgatgatgatgttaatgtagatatttttatattttagttttagtattttttttatttttttatacggaagtagaggggttttttttttttttttttggttatgtttatgtttttaattatttttttagtattggagataagttttatttgtattaatttgtttttgaaggttttgggggttggaggggttataggttttgagttagtaggttgaggtgatcgttcggtagttgtaagagttgcggcggttggaggaggaggttcggtttttgcgggagatttcgttgtagtagaagatgaggttagaggtttaggttatggagttagaggttttggtacgggcggagaaggtcggtcgagttgaggttgagggtttgcgtgttgttttggttggggttgaggttgttcggaagaatttggaagaggggaggtagcgggagttggaagaggtttagaggttgtattaagagtaggtgaatgtaggggtagaaaggatttaaatttataacggagagttgggtagtagtttttaagtaaagaataggtattgtagaaaagattttttatgagtagtgagtagtagagtgatgagatttttggtgaaaataaatatatatgggttagaaagatggagaatttgggtatttttattttaatttaggttgtattttttttttaagatttaggtggttttttattatttgaagttttgtttttttttttagtaggaaatagtttgtttttttattttattttaggtattaatttattaggggtattgtggagggtagtgaggaaggtgggtataagggggttatggtggattgggagagagagattatttagtttttaaatttagtatttattttgttatttttaagatttagtgattaaattagtttgagttttgttttcgtggatggaattgatagtttcgtgggggatatatatatttatatttaatttaattataattaattgtaattaggaggaatgttttgaaggagaaggattagaaagtattaatttagtttggggtttagggaaggttattgtaattagttgatatgttaaggaaagaaattatagttttgggcgtagtggtttacgtttgtaattttagtattttgggaggtcgaagtaggtagattataaggttaggagtttaagattagtttggttaatatggcgaaattttgtttttattaaaaataaaaaaatttattaggtatggtggtgcgtatttgtaattttagttatttgggaggtcgaggtaggagaattatttgaatttgggtagtggaggttgtagtgagtcgagattgtgttattgtattttagtttgggcgatagagtaagattttgttttaaaaaataaaataaaaaaggaattgggagaaaataagggagaatttttttataattttgtagtgggtaaggtttttttatttgtgagttaaaatttaaaatttagaagttataaaggaaaaaattgatttattgattttataatatgaatattaggaatagttaaaaagaaaaaaaaaagttatatttatagtttagattataagaaaagggtaatatttttaatataaaatgtgtgtttagaaattggtaagggaaagattagtaatttaattagaaaatggataaaggagatttatgaaagaaatttagaaataagaagttaggttaggtatagtggtttatgtttgtaattttagtattttgggaggtcgaggtgggcggattatttgaggttaggagttaaagattaatttggttaatatgaagaattttataaaaaaatataaaaattagtcgggtatagtcgtgggcgtttgtaattttttagttttttgggaggttgaggtaggagaattgtttgaatttgggagatagaggttatagtgagttgatattatattttagtttgggtagtagagcgagattaaaaaaataataagttatcgtttgtgttgaataggagttggttagtgaagaggcgtgtgaagtttagtggtagttggaagatatttggtgggataataggtgaaggcggggataggaggttagaaggttggggtatagagatgaggggtattgagtgtgttgtagagtttaggatttagggtataaggttttggttattttagaatttgttatttttttataagagtaatgagtaggttgggtatagtggtttatatttgtaattttagtattttgggaggttaaggtggaaggattatttgagtttaggagtttgagattagtttgggtaataaagcgagatttttatttttattttatggaagaaattagggttgggtatggttgtttatatgtgtaattttagtattttgggaagttgaggcgggtggattatttgaggttaggagttcgagattagtttggttaatatggtaaaattttatttttattaaaaatataaaaattagttgggcgtggtggtttatgtttgtaattttagttattcgggagggtgaggcgggagggtgaggtaggagaatcgtttgaatttgggaggtagcgtttgtagtgagttgagatcgtgttattgtattttagtttaggtaataaagtgaaattttatttttaaaaaaataaataaaaaaaaattgtttttttaagtaataagtaatcgttgaaaggttgtttttttttttttttgagatggagtttcgttttgtcgtttaggttggagtgtagtggcgcgattttggtttattgtaagtttcgtttttcgggtttatgttattttttcgagtagttgggattataggcgttcgttattacgtttagttaattttttgtattttaatagagacggggttttatcgtgttagttaggatgattttaattttttgattttgtgatttatttatttcggttttttaaagtgttggaattataggaatgagttattgcgttcggtttgttgaaaggttttaagtagggaaataatatgattagatttgtattttatgtttaaaaaattttgttatttatgttttttaaattaattttattgttgtatggagatagggttagaggaggtagattaggaagtagggtgggtattttgtttttttttttagtttattttatgatttttggtggttttgatatttttgtaatattttgaggtgttatgagtaaaagatataaaatttttttttttttggagttttttttttagtgtggttcgatagatagtaatatatatatataagtaagatatggttagtgttaagtgtttaggaggacgtgaatagttgatggggtagagtagggtggggagggatagtattagagggtttagtgaagttattttgaggaggggttatcgtttggggtttgtggagtaaggaggggtcgttgtttggtttttagtagatttttcgtggtcggagcggggagtagtgggagagtttttagggtgagtttaggaggtaggtagaggtcgggttttttggtttgtaggtgtggagagatatttgggttttgttgtgaatgttgtgagaagttattgagggtttgtaaagattagttaggagatggtcgttgttgtttaggtaaaagatgagggttggtggtagtggagacggagatagagaggtgaagatatgttttgggggagatcggataagaatttttgatgggttgtggggtagttgcggagagtgagttgttagttttttatttgttgtgtatagttggttgattggttgggttattttttaaggttatagaaagtgggagtgaagggaataaggaaggtttttatgtggggtcgagtttttgttgagttttttttttttttcgtagttgttttttttgatataggtttacgaggaggttttttttagtttgattagtaaggttgagggtttggagaagtttttgagtagtttggaaattagaagagtaggggaagttaaggagttggtcgaggtttagagggaggtcgagttgtttcggaagtagttgaggtaggtgggcggacgtcgacgggagtttagtaattagtgatgtggtggatttgtagggcgttttattgatggttgttttatttttattttaattttagtaagatttaggaagatttggaggtttaggtgattttggttgagaatttaagaaaatatgttggggaataagttttttttgaggtttatagttagatatgggaattggagcgatagaagtttttggatattatgtaggtgagggtgtaggaatgtatttgtgtgtagatttagggattaggttgggaggtaagcgtggtttttggaggagcgtgtagagtatagttttcgggagagaaggtggtatttaaggcggtatggaggttttatagaggggttgtttttttttgttcgtagtatttgtaggaggatcgggatagtttgtatgttatcgcggagttgttgtaggtgcgggtgtagagttttatatatattttcgttttgtaggaggaggagttgattaggaaggtatagtttaatttttagattttttatttttagtcgtattttgtatttattgttttttgtttttttttttgtgggtaggaggggttaatgtgttttagaatttgtttagattttttttttgtgaattttttttgttgtagtttatgttgtttaggtaggatagaggagaaataaagatgttattttttttttttttttttttaggagtttatattttttttttatttttttttttttaggtttaatttttagattttttggagtttgagtttattaggaagtgttagtttttgttgaatcgttggcgggagaaggtgtttgtttttatggtgtagttaaaggtttaggagttggaatatagtgattttgttaagtagttgaagggataggttattgtatttttttttttttcggtatttttttttagtattttgttttttttatgaaggtggtatttatttaattagtgtttattgagtggttgttatatgttgggtatatagttttgaataaaattaaaatgtggagtttgtattttagaatagagatatagaatacgtaagtaaatagataatgttgggtaattatatgtgcgatagaaagattgaagtcgggtgtagtggtttatatttataatgcgattattttggtttttaatttttgattttaggtgatttatttgttttagttttttaaagtgatgggattataggtgtgagttatcgtgtttagttaagtaatgttaatagtttgggagatcgaggtaggtggattattggaggttaggagttcgagattagtttgggtaatatgtgaaatttcgtttttattaaaaatataaaaaattagtcgggtatagtggtttatttttgtagttttagttattttggaggatgaggtgggaggattatttgaggttgggaggtcgaggcgaggttatagtgaattgtgattttattattgtattttagtttgggtgataaagcgagatttttttttaaaaaaaaagaaagtagtaagaaaaatttaaaagataatgtgacggagagattgtggggtgagttagttttaggtaggatgtttagagatagtttttttgaggaggtgatagtatttgaggagagtggtatggttagttggtgggttttgtggggtgtgttaagggttatttttattttcgagtgggtatatggaatgtggaatatggaatattgggtttagattttatttttagaatttaagtttttgtttttttgcgtggtatttattttttttttttttttttttttttttttttttttttgagaaggagttttgtttttgttatttaggttggagtgtagtggtttgattttagtttattgtaattttcgttttttaggtttaagtgatttttttgttttagtttttcgagtagttgggattataggtatatgttattacgtttagttaatttttgtatttttagtagagataggtttttattatgttggttaggttgattttgaatttttgattttaagtgatttatttgtttcggttttttaaagtgttgggattataggtgtgagttatcgtgttgcgatttattttcgtcgttcgttttttttttttttagtttttgtatggtatttttatagagatttttgtatttgttattttgtttttagtgttttttttattttttagttttagagggttttgtttagttttttttttttttttaggtggttttattttaggaaaaagtgatattttagagttaggagtaggttattttgtagcgatttttgtaggataaagtcgtagaggtggaggtggagcgtatgggtgttaaggttggtgttagtttattagagattcggggagggtaagggagtttttgtttcggggttgtagttaggatttagggagggattttgttttttgttgtattttttttagggtttgtagttggagttgagtcgtgtttaggaggttaggcgtcggtggtagtagtagatagttttagtcgaggagtagttgaggtttgtggttaatgttgttagtaggtattagggatggaggggtgggtggagtagtgtttttgttattttaggtttttgggtattttgttgttgaggatttttaggtaagaggggttggaaagtggttattggaggttatagggttgggtagatttagttttattaatgtttttgtgttcgtttttttttttggggaagttttttttgtatttatatttgattgtttgttatgaatttttcgttgtatgtttggttggaggtgaggttttgtttttttttgtagtttagtttagtaatggtttgagttaaatagagtattcgggaggatttttatttgtagtattgtttaaggatggagagtgtagatattttatttttttttttttttttaaaattttacgggtaattcgttttattggagaaaaatttagtttatttatttatttattttgagataaagtttcgttttgttatttaggttggagtgtaatggtataattttggtttattgtaattttatttttttggtttaagtgatttttttgttttagtttttcgagtagttggattataggtattttttattagtgttttttattacgttcggttaatttttgtatttttagtagggacggggttttattatgttggttaggttggttttgaatttttgattttaggtgatttatttattttagttttttaaagtgttggaattataggtgtgagttattgtatttggtttagtttatttatttaaagttgtatatttatttgtttattatatatttaatttgtttattattttatttaaaatgtaagttagttagtttttttttaaattaattgttagtttttgttttttttattaattttttagttgttttattatttataattgttgtatgatttttagaaaaatttttaagaaaatagtaaagtttttttgtgttggtgatgatttttttttagttttagatattgaggtatttaaggtaagtagttttttttttttttttttgagatagagtttcgtattgttatttaggttggagtgtaatggtacgattttagtttattgtaatttttgtttttcgggtttatacgatttttttgttttagttttttgagtagttgggattataggtgtatattattatattcggttatttttttgtatttttagtagagatagggttttattgtgttggttaggttggttttaaatttttgatttcgtgattcgttcgtttcggttttttaaagtgttgggattataggtttgagttatcgtgttcggtcggtaggtagtttttagtatagtttttggtttgtaaatgtttattgttatcgtgaggttttttttgatgggttaatttagataaagataatttttggtttagcgaaattaagatgtaggatgagtttttgtttattattttttttttttgggtttgtattttagggattaatttagttttaaaaattatgaaaaattttaaatttgtacggaattaaattagttataatgatttattatttaggtttaatttatcgcgggtgttttttatttttaggagaatagaaagatgtattgtggatagggtttgattttggtattaggtgattatagaaatggtttgtgtaatgatgtatttgtcgaaagttttttaggtttaaagtagtttaaattttgattgttgttgggtttattagattgtttttaggtaattggagattttaataagagttgtggtaggtgttggaagtatttattggaataatttttagattaaagtgaattttgttgtgttgttggggatgtagttgtaagtttttattattatgtgtttttttgtgggtgtagatttggatttttttgaggaaattttagttcggttttagatattttttggtttttttttggggtttgtttaagttgtttagtttttatgagttaggttggttttatttttggtatagttagttggtaaagtatgtggatttgttcgttattggtgttagatcgatatttttgggtttggagaggataattttgtttttttttgtttttttgagatggagtttcgttttgttatttagttttgagggtaggggtgcgattttggtttattggaatttttattttttaggtttaagtgattttcgtgttttagtttttggagtagttgggattataggtatgagttattatgttcggttaatttttgtgtttttaagtagagagagttttattatgttggttaggttagtttttaatttttgattttaggtgattcgttcgtttcggttttttaaagtgttgggattataggtaggagttattgtttttgattagagaggataattttattttttgatatacgatagtgagtaaaatatagttgtgagaaataagtttaataggttgtttaaaaagatagttatttaatgtatttttggggtaagggttttttagataattgacggaagttgtgcgttttgtatttgtataatgggataggattagagggagttgtttatataaggtatagtaagttttttgggaatgaggggaggtatggaggattagtgatttgtgttttttttagtttttagatttggttcgagattattatggttaaggtggaaggggttgtcgtttagttttttagttttaataatcgatttagttatgttgttcgtaaggtttatattattcggggtgcgtaggataattgcgagttacgttttgtttttattttattagttcggatttttttttttttgatttagttttttttgattttatatttatttatttttttttttttattagtttttgtattttttttttttttattttttgtttttatttttttttatgtaaattttatttttttttttttttgtttttttttttttaggtttgattgttcgaaagtttgtttttgtttagttgcgttaggagaggtgaagtttgtgtattttgaggtggatggggttttagggtattggttgttgggatttttaaaattatgaggattgaggtgggatgggggttttgggattaggtagttgggttattttttttgattttttttttttttcgttttagttgttttttattattatcggttatagatgtgagttttgagttgtagtagttgcgggaagaacggaatcgtttggatgtagaattgtagttgagtgttcgttttatttagtaggaggtgggtcgggttcgggagtaaggtatatttggttgttagagggtggagaggatgaggaaaaatttagtgtttagggtgttgggagaggtttgatttagtattttttttttttaggggaggtagagcggtagtagttgagtaaggtggtttagtagttggagtaggagttgtagtagatttaggagtttttggttagtttggggttgtagttggaggtagtacgttagggttagtaggagagtatagaggaggttgttagtttgcggtaggagttgatttagtagtaggaattttacgggtaaggtgtcgagagggaaatgggtgttttttttggagggtggggtgggaattgcgaattaaagtttttgttgatatgtttcgtttgtatttttattttagttttgtaagaaaaggtggttgaagtggaaattcggttgcgggagtaatttttagatatagagaggaggttgaacgaggttcggagggagtatgttaaggtcggtgagttttgttagggtggatagggttttttaggaagaaggaagtgttaagatataaggttattattttttttttaaagtgtgtttaaagttttattataggaagtaatgaaggtatttaggagtagtatagatgaattattatatcgtgaatatatttatgtagttagtattagattaagaaatagtatatggtcggtcgcggtggtttatgtttgtaatttaagtattttgggaggtcgaggtgggtgtattatttgaggttaggagtttgaggttagtttggataatatggcgaaattttgtttcgattaaaaatataaaaattagttaggtttggtggtgggtatttgtattttaagtttatttgtgaggttgatgtgggaagattatatgaattcgggaggtcgaggttgtagtgagttaagattgtgttattgtatttaagtttgggtgatagagaaagattatgtgttaaaaaaagaattgtgtaatgaatgtattttttttaattaaatatagtagttaatatttgttatatttggttttttatttatatatatatatatttgtatattttttgaattattttaagttgtaattatttaatgttttgttgttgttgttgtttgagatagagtttttttttgttattagttggagtgtagtggtatgattttggtttattgtgatttttgtttttcgggtttaagttatttttttggtttagttttttaagtagttgggattataggcgtttattattatgtttagttagtttttgtatttgtagtagagacgggattatattatgttggttaggatggtttcgagtttttgatttcgtgattcgttcgttttggtattttaaagtgttgggattataggcgtgagttattacgtttaagtaagttgtaaatataagttgtttagtcgtattttttaaagttagtaaatttttttatatagttgtaattattatattttaagatagtgaatattaattgtataaaatttaatttagtttatgtttagattttttttgaggaattttaggatggtttagggatgaggaagatatttaggtttagatttttaggtttttagagtattagtttatttttttaattgtatagaagagatagatttatagagtagaatagtttttttaagttatagagttggtgatttagcgtttgtttttgtttttatggtgtttggttgtttttggtttgatttatatttgttttttttgtgttttggtttttttgtagtggtttttttgcgttagatttagcgtagagtcgtttaggaaaaggagcggagttaggaatttaggcgtttgtaggaggaggttcggaaggaggaggggtagcgattggttcggcgtttgtaggagttagagagggataagaattttatgttggtaggagataggagggtagataggtagatattagggtttattttgggttggtttttgggttagaggtgtggaaagaggatggtgagggaggttttattcgggttaggtttaatttttttttttttaggttattttgtagtaggaaggttttttttttcgttataagtagtagcgattgttgatagtttttttttttttattggataagaagaaatttgtggtgtttagttttaggtttttagagtgtttagtatttgtatttgtagtagtagtagtgtttattagggagtttataaaaggttttgggttaagtataaagggataagggataaatgcgcgtattttaggaattttttttttagattttggtatgatgagtgttgttttttgcggtttttcgaggtttttagttttttttagcgatgtttagtttggattaaagagtttttttttttttattttttattttttgtgttagttttgttttttttgtaattacgagtatttttttttgtttggtgtttatttgttgtttttttttttagggtttttttttgttttgttcgatgatttgtaggatttgagtgaagttatttttaaagaggaagttgtttgttaaggagataattttgatagatgttttagttttaatttttagatgagtagttaagtagttgatagttggagggaaagttagtttgggggttgggaggattttggagaagtgggtggggatagattagtttttttttattttggggttgttttgggggatattagttgagtttgaattttgttttaaataaagacgattatagaaggagttattgtttggaaatgttatttttgggaatttgtgggaattttttttgtagttattttttttggagattgtgagaagtggttttatttatagttttttttatgggtggtatttttttaaattttttttttaggtagttttggaaatgtttgggaagtttttgtttttttttatttttaatttttgttttaaaattttttttttttggaagatgataaatgttaggagtggggaagatgaaatatttattcgtttaataggaatgttagagttaggtattgtattagtttgggggttatttggattttgagagtttatattttagtgggagagcgagcgagtagatgggatttaaatagatgaacgagatcgttttaaataagtgtttgaagagaaagtatagtacgatgatatgatagaaattgattttggggagaggtttttgagtaggggattttgtgtagaggtttgtttgaagtgggtttttgtggaggttaggaggtttttgtagagaatgtttaaggatgttgttgcgaggtcgagatgtggttaagtttggattttattgtaagttaatagaaagttattggagtatttttttaaaaacggggaagaaagttaggtgtggtggtttacgtttgtaattttgatattttgggaggttgaggtacgcggattatttgagtttaggagtttgagattagtttgggtaatatggtgaaatttcgtttttattaaaatataaaaaattagttaggtgtggtggtgtgagtttgtagttttagttatttaggaggttgatataggagaattgtttggatacgggaggtggaggttgtagtgagtcgtgattatgttattgtattttagtttgggtgatagagcgagatttagttttaaaaaaagaagaagaattaaaaaaaaaaaaaaaaaatagggaagggggttcggtgttgtggttttcgtttgtaattttagtattttttttttttgagatagttttgtttttgttgttaggttggagtgtagtggtataattttagtttattgtaatttttattttttaggtttaagtaatttttttgttttagttttcggagtagttgaattttagtatttttttgggaggtcgaggtgagcggatcgtttgagtttaggagtttgagattagttaatatagggagattttatttatataaaaaataaaaataaaaaatattggagggtatggtggcgtgtatttatggttttagttattttagaggttgagttgggaggattgtttgagtttaagaggttgaggttgtaatgagttgtgatcgtattattgtattttagtttaagagagcgagaatttgtttttattttttaaataaagggaagacgtaatatgatttggtgtatatttttttttttgagggatttattggatggttttttttagagtgaggtatatatatttacgtattgtggttagcgattgttttcggtatttagcgtagtagatgggtgggtttaattaggttatttttttaggagggtataattgagtagttttcgtattaggtttacgtgggttagtagtatgcggtaggtagcggttgtggtgttttaggtttagggcgtttttattagcgtatttggattgtagtagttttaggtaggttttttacgtgttgtttatagttttgttgtaggtgaagtagcgtatataatttttgagtttaagtggtttttttgtgttagttttttaaagtgttggtatgagttattacgtttggtttgatatatatatatatgttttttttttttttgagacggaattttattcgttgtttaggttggagtgtaatggtgtgattttagtttattataatttttgttttttgggtttaagcgatttttttgttttagttttttgagtagttgggattataggtatgtgttattatgttcggttaatatttttgtatttttagtagagacggggtttttttatgttggttaggttggttttgaattttcgattttaggtgatttgttcgtttcggttttttaaagtgttgggattataggcgcgagttattatattaggttcgcgtgatgtatattttaagattttttttgttggtggaggataggttttgtgtgagggggagggataaatagtgggagtaagggggttaattagaagggtgttggggaggtttaggggagatggtggtttaggatgatgggttgggtttggatagggtgtggaggggtttgtaggtggatggtggaggagtgtaacgaaggtttttgcgtgagttttggagggaatagatgagattacgttattgtataataaggtgttttttattgtggggtagcggattaggtagggaataatttgggaggaattaaattttattttggatatgttatttttgaaaggttaatagatttttaggtagaaaggtttttgagggaaatattttaggggtttttttgggaggtttagattaaggagttgagattaaaaggagaatgggagggaggagacgagtataatagagttggagttaaggttttagaggcggataggtggatttttgagggaggaggaaggggttgaggttgttggagtttggtagtttttttcggagttattggtaggattgatgtaaatagttttgggtgggaagagggaattaggatatttttttgtgtttttttttttttgtagttattttgggtggttgttagatggaattttttggatattattgtttggaggttttttgtatgtttgaagaaggatatggtggagagtaggatgtttggattttatgggggaagggaagtgtttaggaaagtacgaagttttagggggagtttttagtgcgggggtgagtggggaggttggggtagtagttgatattgttttagttgtattttaggtttgaaaggtatttttttttttagcgtaggtattttgttttttaattttgtaattacggtgttttttaacgtttatcgtgtggtttgtttttattttttggtttttaatagttgtaagggatgaaggtggatatttttgtgattacggagatgttaagtgggtattgattgttttagggtgtggatggagggtgtgaaaattagggtggggtgacgtaggttttgggttatgatagggagagtaggtagttgggttttgggttggaggattaaaataagggacgttatttttaggggtgatatattagtttaggtttttttaacgggtttgattagttttgttttgatggtatttttgtgttattgggttggttttttttttattttttttttataaagttttttggggtttttaggtatttagatttagtttattttagttttgggggttagtatatagttatgatttttaattggaagtttttggggattttggttttttgtttgtatattagaggtgaggtgggaatagaggtagggattgtagtttggggtgatgagggatatttaagatggcggaggtgaattggacgtatggggttggggataggaatttaggggacgtagaaggtgtatttggtttattagaaatggttttttggatatattgggtgggggatatggtgtagaaggtgtatttggtttttattagaaatggtttgttggttttatgtggtaaagtcggttaggattaacgtgggggggacgagtttttttggagttgggatttgtgttaaggagttggggtttttgtaaagttggggtttgtgtgtttgggggttaaggtgtaatttattttgggttgtaggttggtttgaggataaagttagtggggtattttaattaggggtggatggagtttatttggagaagtttggttagtttaaagtgggttaagtgaacggtttagatttatcgggggtaggggtttatgatattttattattagttaagtatttataaatttatcgagagttttttgagagtgatttttttggtttgtttgtgggttagtttaggttgcgttcgtttagataggtttttttttttggggttggggttgggtggggttggggagagaagtttttattattttttatttttttttttttttttttataggtattttaggtagcgagggttattttttttatttattcgtagaggatcgagaggaggtaggttttttaatattgttttagggttttttagttttcggtgatttttggttaggggtattttttttttttgaagatttttcgtttattcgttttagtcgtttttggagagatttgtttgaaattggagtttggttttttgaatcgtttagaacggattttttttaattttttcggtttgacgatttttggtcggtaggattttagtttttagaaaatttttggttttttgtttttgaggtggataatcgattttaggaggagttagatttagatttatttcgggaagagtatagataatggagtttttttagtcgttttgtttttaggtatttttaggtatttacgttttttttattttttgatttttcgtgaattttttttaatttagtttatttttttaaattttttttttattttttcggttttattttgaattcgtaaggtggtgtttttaatattttttgtttttttttgagatttatatttagtttttatatcgttcgtttttttttttgatagtttaagtttatttttttatttcgtttttaggtttcggttttatttattttttattcggtttttttgttcgcgcgatcgttggggtagggttacggtattgtgtttttttttgttatttggtggtcggcggtaggaattattagtagatagttgttgtttttatgaaacggaaaaataaaaattatgtttttttaattttgaatttaggttgttgttttaattaatatttagggttttttttatttatttttatttatttgtttttttttttttttgagacgaagtttcgttttgtcgtttaggttggagtatagtggtacgatttcggtttattgtaagtttcgtttttcgggtttacgttattttgttttagtttttcgagtagttgggattataggcgttcgttattacgttaggttaattttttgtattttttagtagaggcggggttttatcgtgttagttagagtggtttcgattttttgatttcgtgatttgttcgtttgggttttttaaagtgttgggattatacgcgtgagttatagcgttcggtttttttttttttttttttttttttttttttagatggagttttattttatgtttaggttggagtgtaatggtacgatttcggtttattgtaattttcggttttcgggtttaagttatttttttgttttagttttttgagtagttgggattataggtgcgtattattatgttcggttaatttttgtattttagtagagatggggttttattatgttggttaggttggtttcgaatttttgatatcgtgattttttcgtttcggttttttaaagggttgggattataggcgtgagttatcgtgttcggttaatatttatgtttttgattattaggatgttttttttatagttttaaatttacggagatttggaagtaatttgagtttttattttgtttatgtttagtatgtaaggttttggggtttagtaggaggagggttggaaatgttattatgtaagttataataatatttaggtttatatttttttttttttgagaatattatattaaagaatgggaaggtaagttttatttttgtttaatggtttatggtttggatatttttagtggtatatgtaaatttttttaggggtgtgtcggtaggattagttttaagggaattagtttttagattaatatgtgtttttcgttagaatgaattttttgtttgttttgggtttgattagagtgttttttttagagtcgttaaaggttaataggaaataaattaattttttttattttattaagagatttattttttttttttttttttttttttttttttgagacgtattatttttttgtcgtttaggttggagtgtagtggtacgatagatattagtttattgtaagtttcgttttttggatttaagtgatttttttgttttaatttttcgagtagttgggattataggtgtgtgttattatatttagataagttttttatttttagtagagatgggattttgttatgttggttaggttggtttcgaatttttgattttatgggatttgtttgttttggttttttaaagtgttaggattataggtgtaaattattacgtttggttaagagatgtatttttaataagttattttttatgtttttttgtgtgtttgtttgagatagggtttttatttgttatttaggttggagtgtagtggtacgattatggttcgtatagttttaattttttgggtttaagtaatttttttattttagtttttggcgtagttgagattataggtgtattatttttgattaattttttgtatttgtttagtttagttttgtttcgtttttagagatggggttttatcgtgttgttcgggtttgttttaaattttagagtttaagtgatcggtttattttggttttttaaagtgttgagattataggtacgagttatcgcgtttgattaattttttatgtttaatttttgtgaatatttttagttttggttaattgtaataattgtaatataaatagaataattgtttttaatatttgtttaagggtttgtttacgtattttttaaaaggatgttaatagatatgaaagttttatggtattatatttaatttgttatatttagagtgacgtgtagttttcgatagattgagtataataaattgtttttaattttaaaaattgatatggttaggtatggtggtttacgattgtaattttagtatttgggaggttgaggtaggtagattatttgaggttagtaatttaagattagtttggataatggtgaaattttgtttttattaaaaatataaaaaatttagttgggtattttagttattcgggaagttagggtatgaggattgtttgaatttgggaggtagaggttgtagtgagtcgagatcgtattattgtattttagtttgggagatagagtgagattttattttaaaaataataaataaataaataaatatataaatagtgatgtgatttttaatatgtatttgtaattttttgaaaagtttattttttggaatgttattaaattattataaatgttaaatgttgatttaaaaatgtgtaaggggttgggcgaggtggtttatgtttgtaatattagtatttcgggaggtcgaatcgggtggattgtttgtggttaggagtttgagattagtttaggtaatatggtaaaattgtttttatagaaaatttaagaaattagttagatgtggtggttcgtatttgtagttttagttatttaggaggttgaggtgggaagattgtttgattttgggaggttgaggttgtagtgagttaagatggtattattgtattttagtttgggtaatagagtgagatcgtgttttaaaataatataaatgtgtaagggatatagttttttaaaattttttaaagaggtaattaggttagaaggataggagtttagagattttaatggtttattgttaattaagtattcgattagggttagggatgaagaggggttaaaagaaattgaggttgtataattttaaattttattatttagaatttagtttgtttatgtggtaatttttattaaaaattatatatgagaggtcgggcgcggtggtttacgtttgtaattttagtatttcgggaggttaaggcgggcgaattacgaggttaggagatcgagattattttggttaatatggtgaaatttagtttttattaaaaaatataaaaaaaattagttgggtatggtggtcggcgtttgtagttttagttattcgggaggttgagataggagaatggcgtgaatttgggaggtggagtttgtagtgagtcgagattgtgttattgtattttagtttgggcgatagagcgagattttattttaaaaaaataaataaataaaaaattaaaaaattatatatgagattaggcgtggtggtttatatttgtaattttagtattttgggaggttgaggcgggtggattatttgaggttaggagttcgagattagttttattaatatggtgaatttttgtttttattaaaaatataaaaaaattagttgggtatggtggcgggcgtttgtaattttagttttttaggaggttgaggtaggagaatttattgaatttgggaggtagaggttgcggtgagttaagatcgtgttattgtattgtagtttgggcgatagagtaagatttcgttttagaaaataaaaaataaaaaaaaattatatgtggttcgaatgaaataaaattaagtttagggtttaggaataatttgagaatatataagaattgtaggttgagtttagtagaattaaataggttttaagttggattggatttatttatttatttatttattattttatttttttaatgtgtttacgaatgtcgggtgttatgggagaatataagaatataaataataaaaatatgtagtttttatttagaatttaaaattgagagagatagaatttataggtaagtttaaataatattaaagatagtaaaaatgtatattttttaataatgatatgagcgagcgttaatgtaatagttttggtagtaaacgtcgtgagtttagaagagttacggtgagttggattagttaggggaggtttttgggaggagggttcggagcgggatttgagagaagaataggtagtgtgtttggaggatggattaggaagggtagattcggagttttatatagggtgtaggtatagaagttgtttttaggtgatgagttttcgtggttagaattattagttttagggattagtttttgcgcgtatgtgtattagttttcgtgtgtgttgttttttatgtttggaatggtcgtttttttttaaattagttgtatttttttttagggatgtttttgtttatattattttttttcgtattttattcgatttttaacgttttttattttagttattttatggtaatgatttatttatgtttgttttttttttttaggttatgaattttgtgaggtagggattgtgttttacgtatttttttttgaatttttttattatttttgtgtttacggatttttagagtgttaaattatttttaatagtttcgtttatgtttttgtcgggattttttttaggggtagagagttggaagtatttggaaattttttttttttatatttttatatgttattatttttttatttttttagttcgtttttaggttttaattaacggtggataaatatgaaggtgttagtattttagttttttatgagatttagtttggttttatttatgtgtttgggttttatttttttattttttttttatttttttttatttttattatttttttttttttttaagatagggttttattttgttatttaggttaaagtgtagtggtataattataatttattgtagttttaattttttgggtttaagtggtttttttgttttagttttttgagtagttggtattatagatgtattttatttattgggttaattttttaattttttgtagaaatgatgttttgttatgttgtttaggttggtttggaatttttggatttaagtaatttttttgttttggttttttaaagtattgggattataggtgtgagttattatgtttagtttttttattatttttatttatttatttatttatttatttaatttttgagacggagtttttttttcgttgtttagattggaatgtagtggtgtgattttagtttattgtaattttcgttttttgagtttaagcgatttttttgtttttgttttttgagtagttgggattataggtatgcgttattatgtttagttaatttttgtatttttagtagaaatagggttttattatgttggttaggttggttttaaatttttgattttaggtgatttgttcgttttggttttttaaagtgtcgagattataggtatgagttattgtgtttggtttatttatttttgagatagtttttattttgttgtttaggttggagtatagtggtacgattatagtttattgaagtttggatttaagcgatttttttatttaagttttttaagtagttggattataggcgtatgttattacgtttggttaattttttttgtagagattgggttttattatattgtttaatttggttttaaatttttgagtttaagaaatttttttgttttcgttttttaaagtgttgggattataggcgtgagttattttgtttaattttttattagttttaaataaattttttttatttgaatttttgttttagggtttgtttttggggaatttaatttaggatgtaaagtatttgttatatattattgtaattattttttattgcgtatgtgttatagggtattgttggtaaatgttttatagtttaagttttcgtttaatttgtataataatgttattatgattattttatagaagatagaaataggtttagagaggtatagtgatttatgtaaggttatataggggataaatggtagaattgggattttaatttaggtttgtgttatgttaataatattgattttaattattatattattttagtttttttttttttttttttttttttttgagacggagttttgttttttttatttaggttagagtgtaatggtacgattttggtttattgtaattttcgttttttgggttaaagtaatttttttgttttagttttttatatggttgggattataggtattcgttattatatttggttaatttttgtagtttttttttagtagatacggggttttattatgttggttaggttggttttgaattttcgatttcgtgatttattagttttggttttttaaagtgttgggattataagtataagttatcgcgtttggtttattttagttttttatttatttgtgtaattttgatagagaatatagtgtttgggtcgttatgtatatttaatgtgtgttttgtgaaaggttaaattatttaatgaagggtttaattaataaagagtagatcggaatgattggagtaaaataattcgaagaagagagagatatgttggagagataggtcgggggaaaattagggaagattttggtgttaagtgtaggagtttatatttgaaagttttttttttttattagaattgtgtttgggtttgggtaatataataagattttgtttttgaataaataaaataagttagttgaatatggtagggcgtatttgtaattttagttattttagaggttgaggtggaagattgtttgagtttaggaggttaaagttagtttgggtaatatagtaagattttatttttaaaaaaaaaaaaaattaaaattaaaaaagggttaggtatagtggtttatatttgtaattttagtattttgggaggttaaggtaggaggatcgtttgagtttaggagtttgatattagtgtgggtaatatagtgtgattttatttttataaaaaaaatgtttaatatttggttaggttgttaggcgtagtggtttacgtttgtaattttagtattttgggaggtcgaggtgggcggatcgcgaggttaggagatcgagattacggtgaaatttcgtttttattaaaaatataaaaaaaattagtcgggagaggtggcgggcgtttgtagttttagttattcgggaggttgaggtaggagaatggcgtgaattcgggaggcggacgttgtagtgagtcgaggtcgtattattgtattttagtttggacgatagagtgagattttattttaaaaaaaaaaataaataattagttaggttatggtagtgtatgtttgtagttttagttatttagtaggaagattatttgagtatgagaggttgaagttggagtgagatatgattgtattattgtattttagtttggatgatagagttgttttagaaaaaaaaaaaaaattgtgtttagggtggggagaaatatatatatttttgggtatattgtggtaggaagttaaggatagaaaggaagaaggaggtttggattttttaaattgatttttaagttaataacgtggaattagttaggaggaaaaaaaattaattaattaattaattttttattttttgagataggtttttgttttgtcgtttaggttggatagtgtagaggtgtagttatagtttattgtagttttgattttttgggtttaagggatttttttattatagcgttttgagtagttgggattataggtatgtgttattatgtttagttaagagaaatttttaaagaagagagaaaggagggaaaggaattgagtttttgatgttgtttagggaaaaagttggggttttttatagtatgttgttttttttaattttatagtattatgtgggtttttatgtttttatttttttggaaagtatgagttttttgaagatagtaattgtgttttgtttttttttgtatttttttttttttttttagtatttagtttagaaggtatttaataaagtaaatgattagttttattttatagacgaggaattaatattgagagaggtaatttatttgtgtaagttatattataagtgttaaagttaagattggatggaggattgtttggttgtaaattaattttttttaggttgatatggtaggtaggtgagtgggaaagagaagggggaggtataaggtaattggagattttagtatttattaataggtagtggattttggtatttaaataggttgtttttattagttggggaggagattgagtgggtttggatggtatggaggtatttgtatagggaaatttattgtgttggtttatttatttagattagataatgttggtttttttttatttgttttggttaagtttatttaggagtaaatgttttagggatatcgttacgtttatgttaatatagagttacggaattaaataatagaataggattatagatttatagaataatagtttagaattttggatatgatagatagttattaaatgtttggttaatgaaaaaaaaagaatttagaattagtattacggtaaaatttaattatataagttaagttattttgagaaagtattaggtatagttttgagttttgggtagcgaatgatgtttttggattagatagaagagatggttgtttgttttgttttgaagttttttggttagggaaattttaaattatttatttgtttatttatttgtttatataattaatatttattgagtatttgttttgtggggtgttatgtgatggtgatagttttaggaagtagttttagttttttttgtttttaaggggttttgtgtttagggaggataaatatatatattatgataataaaatttgataaaaagttaaattagagagggggtaaattttgacgtaggagtttaggagggatttttaatttttttgttaattttatgttttaaaattattagatttaagattcgttttggtataaatttaagtttttttattgtatatttttttttttttgttaatttttaattaagtgtttattaggtgtttggtattgaattaaaatttaaaaaatttgttgaattaagttaaatgtattttttgtgggtttttttttttaatatttttagaggtagtaattaattttttttttaaattttttagtttttattttatttttatttttttttttgtagtataattttaatttttgtgatgggggtaggtaggatagtatggtagtgagattaatagattgtgatttgggtttttgtcgttatttagttatttattttgtatgtgattttgggatgggattttagggggatttttttaataatttttaaattttcgtgtaatgttgagagttaaggtagcggtttttaggttttgttttaagaattgttattagagggtagtttagagattttttttaggtgtttttttttagagtttttgtttttttttttattaatgttatttattttttgggtttattattaaggtatataggtgtttttttagtcgttaaggtgatcgttttaaggtgagttaggtatgtgaggcgaggcgagataggttttgaagtttttaggaaaatttaggtataggttgtttgtttaagtggattttacgattattatttatatattttttttttgattattttatgagttagcggtttataggagaggatattatagttagttaaagggattagggttttgtttttagggagttgttttttagtgagggaggagagagatatatagatgtttataaggtatttgtagtaggatgttatttagtgatgaatggtgtgacgtagtttaggtagagcgaggaaatagggatggttttaaacgtgtgtgtgtatgtgtgtttttttgagatagagtttcgtttttgtcgtttaggttggagtgtagtggtgcgattttagtttattgtaatttttatttttcgggtttaagtgatttttttgttttagtttttcgggtagttgggattataagtgtttattattatattcggttaatttttgtatttttagtagagatggggttttattatgttggttaggttgggttacgagcgaaattttattttaaaataataataataataataataataataataataataataataataataatttttgttttttagggttattgagagaatggagattagttttgtacgggtagatttcggtatcgagttgaatgttatatattgttaaggagtcggcgtcggtttttggtgaagatgttttagttttagggtttaagagaatagagcgggatacgagatgtttttttaataggagtttgtgttttttggttatttttgtgtgttgggtgatgttttaggtgttagggagatattgggtagtaggagaagtttttttttgtgaggatttttatttagaggtatttagatagtttagaatataggagggaagatgggttattatagttttatttttaggcgttttaagggttagtttagtttagaagttttttttggtataagttttttcggttttttttttttcgagagtacgtttagattgtattttggcgtttttttttattttgtcgaggaagttgtgattttaattttgggtgattagtaataataaaaattattaatagttttagtggaaagaatgattatttaataggtgtatataatgagtagataaggagagttttttttttttatatttatttcgtaggatagagaggggaatagttttgttattgtgatagttaattatagtttttgtgtgttttttttttcgtaagataagaggggtggttttagggtgtgacggaaatagttaggaaggtttcggttagggagcgattgttttatagttgattttttgttgtttttgggaagtgggggtgaagggaaaagatttaggggagcggggggaagaaagtttggtgggtagaattttatttgttaaatttttttttttttaggatttagtggttaaaggtgagtttggttttggttttagtttttatttttaagtgtcggttgtagtgttttgggttcgtcggaggttggtagggttgttgggagggtgaggataggtatgggaagagtggaaagtgggggttgatttagttaagttttaggaggttattttatagaggagagagttattggattaggagttaagtagggaagaaggaaggaaaggtagagtcgagtatcgtttatattaggaataattttaggaagaggatggtgtggataggttttaggatagggttttttagttaggggtaattcgttatgttgtagtgggggtatttaatagaattttttagggtttttttaaagtatatagtacggttttgtttattattggtattagatgaatgttatgtttaggggaaattttagtacgtttttattatagttatgtgaatattgttgtttgtttataaaaatgtgttgtatttttagggggaaataaaaggagttaatttaatagagagaagagtggtttaggggagatagttattcgcgaggaatgagggtaggatatataggtttaggtcgagattgtatagggtgttgtatgagtggttgtgttagagttaagtgtatatgtttattgttattttcgttaaggttattagtgaatttttttagtatttataggggttttgtatataagagttgtgtttgtagggggtggggggtgggtatagggtaggaaattagagaggagggtattatgtttttgagtaaggtagaaaggggaagtatagtttggatatatttttttatttttttattttaaaatattattaagtgtttgttatagttatgtgttgggaatttagtgaacgtatttgtggttttgtttattggtatggagtttacggttcgggggtgatggtttttgttgtattttaaagttattggggcgttgtatagatggttggttgtagagtttatttgagacgaaggtaagaagttagggtttatggattgtagattttatttttgatcgtttattataggaaagaagttatagaagtgagggggtatttttaataggaaggtagagaaggagagattaaaattgagttaagaagtgtagttagttttatgggagtatttgggttgaggagggttagttttcgtagagatgttcggaatatttgattggggatgtgttttttttttttatgtttttggttattagaggaattaggtgaagagtgtggatgatttagtttattttttttcgtataggaaaaataatttagaggatattttttattgggagtgggttaggagcgttggtttttacgttaaggagaggagggtgttgttgtggttgtagaggtgagtttatagggaagcgtgggtgttatggagaaagagagaggagaggaaatggtttttcgttggagttaagtagagaggaataaaggaggggaggagtttataggttttggagttttagagtagttttgggtggtttttttttttttttttttagtataaaataagttgtttttttaggttttttttttttttcgtgtttattttatttttttttttttaagtttaagttttggtttattaaggatttttatgtgaaatatttgtgttagaatttttgttttgatttttaggtttttagaggaggaaagttgtggaggagggattttatgagttagtaatttttatttaggaattttttatttttttttttttgagacggagttttattttgttatttaggttggagtgtagtggtatgaaatcggtttattgtagttttcgtttcgttggtttaaatgatttttttgttttagttttttgagtagttgggattataggtgtttgttttcgtattcggttaatttttgtatttttagtagagatggttttgttatgttggttaggttggttttaaatttttgagtttaagtgatttatttgttttggttttttagagtgttgggattataggcgtgagttattatatttggttagttttgatagtagaaattttttttttagaaatatttatatatataaggaattttgtatatatttttatagggtttagggagttttttaagtttgtttatgaatttttgttatttatttatagtatggtgttagttgtagagtaataggatttatgtgggtttggaagtttaataggtttgggtttgaattttttttaaatatttttgtttgttagtagttggtttggataaataattttaatttagtttttttatttgtgaaatagggggaaaaagtatttattttgtagggttgttgtgaagattgaataagataatttatgttaaatatttaggtatcgtgttcgtttgtagtaggtagttagtatatggtggatttcgtgttttaagttttttttttatggagttttttaagttgttttagttggtttcggattttttttatttttattttttgggtagttgggattatagtacgttatgttttagttttttttgtgattatttaaagtcgtttggttttttgtatttttttatatttattgtaatttttatagaatttaaatttttttaatttggtgttgtaggttatttataatttcgatttaagtagtttgtttttttttttatattattgttttttatatgtatgttttatattaatttacgttattcgttggttttaaatatatttgaagtattataaggttttacgtttggttgtttgttttgtgttttttttattattttttaaggttcggggaaagttttgttatttttttgaagttaagtgtttattcgtttttttattttaggttgtttttttacgttgtgtgtttttagttggatggtagttttttagggtaaggaataatttttttttttttttagtgtaatttttaaaatatagtagaggagcgtgtattgggggtaaaggttggtatagtaaatatagtagtatagggttgttggaggggtggaggggatcggaggggatagtgatttgtttgttttataatatatggttgggagttttattttttgtttatggaagttatgtgttttgagtttgattttttcgggtgtagagtgtttacgttatttatatttttttattcggtttaatgtacgggtacgggtaggggtagggttagaatttgttgttgtagaatatagtagagttgtttgtagtattgtggacgttattaaattggtagttttattgaaggtgattttggtttgtgtgggtatttagttgatgtttttttttttttttttaagttttattagttttaggtttttattatttgtattgagagaaagattaatggtgagtattagagtaaaatttagtatagaaggtagggttttagtaaaaaattaaaagtatggtagattagagtttaagggtttataggtgggtaggatagtagaggaattgggtagtttagggtggtaggatggggtggataggagtggataggagagagtagttaggaggagggacgtggttgtattattagtttacgtgggcggttggagatttggtaggaggttaggagagattgtgttttttttagtttggttgttttggttaagttttgatggtagttaggaggattgtgagaaagaaaataagataaattttgttatttttggttggttaggggaagtttgtgttggaaaagaagaagttatagattttattgtttcgttgttttttttttttatattttgggacggtttagtattttttagtttatttttttttgttttttgttattttttttattattttagtgttttttttttttttgtttaggttttttagggagttaagtttgagagtttagggaggtttataagaggaaatgatgttcggaaagagtagtattattttattttttgagatggagttttttttttgttatttaggttggagtgtaatggtgtaattttggtttattgtaatttttgtttttagggtttaagtgatttttttgttttagtttttcgagtagtagggattataggcgtttattattacgtttggttaatttttttgtatttttggtagagacggggtttcgttatgttggttaggttgatttcgaatttttggttttaagtgattcgttcgtatcggttttttatagtgttgggattataagcgtgagttatcgtgtttagtcgagtagtattattttaaatggtatttttgttttatatttgtgtttgtatttttatataaggtaggaagggagtagaagatattttgttagtattggttgggttggagatttaggaaagggagtttggggttgtgggggtgaagttggtttatttgttttttttagtggaaggatgaagataggagtatttgtagggttttatttgttgggttttttattgggggattgtattttttgttttatttaatttttttgataattttttatttgatgtttataaaaattttgcgaaataagtgttatttaaaatatttttattttatagatgaggagatggaagtttagaaaggtttgaagagtcgtttaaagttaagaggttagttgggatttgaatttacgttatttttattttgaagttagtgttttttgtttgtttgttttttttaaggtattagttttttttaggggattttgttttatttttttttttttttatagtttttttagtttttttttttttttatttttattttgagtgttattagtaagttaagagtaagattagatggtagttattagttgtacgtggttaattatattattataattaattaaaattaaagttttaaatttttggtggttaaatttgttttatgtggttagtggttatcgtatcggatagtatagataggaaatatttttatttttttgttggtttgaatttaaagggcggttaggaggtagagggaatgggagagattagtttaaggggtttagggatagagttgtttttgtgaggagatgaggtttgggaagtgagtttgggtgaggggagtaggggtgtttgaggtttgggggaggagagggtagtttgttggatttgtaggtattttttttcgatattgatattttcgtaatattagtgagtaattaattggttggggcggggtaggggttagagtaggagggaggttaacgtaatggaggagaagttattatttttttagtagatggtagggtttcggtttttttggtttttttttattttttgaggattcgggagtttgtttggtttttttcgatttgtttagagttggttgttgttttttgttcgtttatttagtttagggttagtagatgggttacggggttattatttttttaattagtttttttagttttttgtttatttttgaggtttgggttattagttatggggaggggttgtgagtggtttgtgagtaattaaggtttagttttgatagaggttattagtttaggttttttttttggttgagttttggtttttagtatttttttttattttcgttattatgtcgtttttagaggtttttagaagcgataggttagggagttggttttgggaatgtggtgttttatttttgagaaggagaaggttttttaggtgatggaatacgtaataggtatgtggttggtttggtatttggggagtggtgggagggggagtttgggggatgggggtagaatttatatttgaaggaggaaagtggaggtggagtgatggggttttaaggaaggagtagattaggggttgtgaatgggattttattggggttgggtgggtggggttggagcgggtatttaagtgtggaagaaaaagttgaaatatttacgattgcgagtggagggtagatggagagataggttaagttacggtaggtaggagagttaaggagttaggtagttgggtttcgtggtaagagtggtcgttttagagtgggtggtcgtggggtagagcgtttggtttcgggttaggtaatgaggagtcggggttaggtttgttaggtggtaggatcgttagagtttcgtggttatgggtattttatattgtagttattgttgttgttgagtaggtagatgtatcgggttgattattacgtttttttcggttatattaatttttttcggggtatttattttttttatttttttttttttttttatagtgatttttgtttagggaatgtttagttttggtataaaggatttaggtgttttcgagttgttattagttaggaggtcgtgtagttcgagatgggttcgtttcgggtattttggatggggcgtgtgggtgggtacgggatgatggtattgttgttggttggtttttttttgttaggtaggaggttgggggttttgggaataggagggaggcgggagggagatttcgggagaggatttagcgaaggggacgggtaggggttttggaatttgttttttgagtttgggggttgttttttattgtatggtcgttttaggtaagttttttaaattttttgagttttagtttttgaaattttgaagtggggttaatgatatttatttttagtttgtgtgttttaaattaaataatgtatgtgatatgtattttggaaattttagaggtttatataaatggtggtggtgatttttattatgggagtattataagataatgattggatatttaatagtaataatattatttttagagtttttttatatgttagattttgttttaagtatatttggattatatattagaatttttatttttattttttttgtgagatggagttttattttgtttttaaggttggagtgtagtggcgtaatttcggtttattgtaatttttattttttaggtttaagcgatttttatgttttagtttttagagtagttgggataataggtgtttattattatatttggttaatttttttttttttgtatttttagtagaaatagggttttattattttggttaagttggttttgaatttttgatttaagtgattcgttcgtttcggttttttaaggtgttgggattataggtatgagttattatattcggtttatattagtatttttgattattataagaacggtatgaaaagagatttgttatttttattttatagatgaggatattgaggttcggagaggttaggaaattagtttaaaattatgtattagaaggtagtaaagttaagattttaattttaggttaggtaatttttggatttgtgttgttgattatcgggtatttatagtttttgaggaatttttgcgatttttttatggtttagtgggtggttggtgtttgagggaatagcgaaagagagaggtaatgtatggtggattcgtgtagaggattgaagggaattggtatagttggggttcggcgtggaggtgtatgtagagaatttttttttgaggagagaatagggatattatagaggatggtagtttggttgttggtggagggattaggatgagtggtagtaataatttataatatataatgttttatattttttaaaatatttggtcgtatatgatagtttgtgtttgtaattttaatattttaggaggttaaggtaggtgaatcgtttgaggttaggagtttaagattagtttggttaagatggtgaaattttttttttattaaaaatataaaaaattagttgggtgtggtggcgggtatttgtggttttagttatttgggaggttgaggtaggagaatcgtttgtattaaggaggtagaggttatagtgagttgagatcgtgttattgtattttagtttgggtaataagaaattttattttataaaaaaaaaaaaaaaaaaaaaaaagaagaaaaaatttttaggtggatgattttatttagttttttttatagtaatgttgtgggaaggtagggaaaatttggtttttttgaatgtataaattaaagtttagagaggtttagtaatttgttagtatgtggttttgtttgtaatacgtgggatttggaggggttagggaaggtagaaggaacgtaggtgaaagagttatggaggaattatggggtaagttgggtttggggttttgagtaaaggaaaggaaagataaggaaagatgtggttttatatttttgagggaagttaaggtagtagaagttagatgaggggttggatagaggtaggtgtgtttagagagggaagttgattgtggttaggagtttcggaggttcgtggggtttcgttttggttttttgggttgggttagcgagagtagggttggtttagggtgcggtgttttgatatattggtattagtaggttttgaagtaataggtagtgattttatattttggtttttatttagttttattggtatggttagtgttgagataggaaatagggtttttatttttgattttagtttgggtttttacgaagaagttggtgattaaattttagttttcgagtgtttttttttttattttagtttttttgtttttagttttgtttttttttagtgtttttttttatatgtgtttttattttttagttttttattgttttgttttttgtttttttttttttggttttattgtttggtttaggattttttttttaagaatttacgtttggattttttagagttttagtttttttaattttttgtttttttagggtttttttttttagatttatttgtttttgttttttttttatttttttttttttttaaaaaaaattttaattaaaaaataaaatatagatggggtttatgttgtttaggttggttttgaattttggggcgtatgtaatttttttattttagttttttaaagtgttgggattatcggcgtgagttattgtgtttagtttttttttatatttaatgtatttttttgaggttatttattttggtacgtaattttttatttttttggttggtgtttgtttattttttttaaataaagaaatgtttttattcggttattttaatattttttagagataatagttagtttttttttttttttttatttttaaattttttttgcgttttgtttgggagaaattcgagaggtcgattattgagataaggtagaaaggtgagggaggaagttaagtttttttggtttttattaattattgtttttttttatagggattttggttaagagtattggtatttttttagatttttgtaaggattttacgcgtattattttttttaacgatttttgttttattgggaagggtgattttagcggttttagtagttatagtggttttagtagttttggtagttttatttttagtgttagaagttttggtggtggttttagtggtagttttagcggatttagtattgtttagggtggttttgtaggattttttaagttaggaacggggtatttttaggttagttattttttcggatttggttttagtttataaggtgtattcggttttttttagttggggagtagtagtttttattcgggaagtagcggtttttattcgggaagtagtagtttttattcgagtagtagtagtagtttttagtttagtagtagtagtttttaagtagggaatggttttgttttgttaattaatgataatttttatcgcggaatattaaattttttttagtttggataaagttttttttttttttaaatttttggggtatttagtagtggttaaagcgttagttttaattagcgtttttgtagttcggatattttcgattttttttgtagtggagggtttatcgtttcgtattttggtttttatatttttagtttttattttgtgttagggggttagaggtttgtggtggtggtggtggattagtacggttttggtgtttttggagtggtttaaggttttttttgtagtaatggtggttttttaggtaagttttgttttttaattatttttgtagataaattttatggtggttacgaggtggtgggtggtttttttgatagttatttggttttaggtatgatttatagtaagggtaaaatttattttgtgggttattttattaaagagaattttgtgaaaggttttttaggggtttttttttttgtagttgggttttttatttttgagggtaaatatttttttagtaattttattatttttagttagtcggtagttttttcggttattgcgttttagttagtggggattggtggggtttagttttgtggaggcggttttacgggttttaagggattttgttttttttttagttttcgagtttttagtagttttagtatttttagtagtttcggtttattttattatttttgcggtagtgttttttagagtttttgttttttattaggtatcggtttttttagtagtagttttagtttttaatcgagtggtaaaattattttttagttttgtggtagtaagtttagtttttttggttatttttgtatgtttgttttttttttgatattgattgggggtttcgatggttttttttattttgattttttcgttggtgttaagttttgtggttttagtagtgttggaaagattttttgtcgttttattcgggatattttagtttaagtgaagtttttggggttttagttagttgattttgaagtttttttattttaaggagagttattcgatagtttataagttaattgttgtgtgtgtgtatgttttgggtataaataagtatatatattatattttatatgggagaaggttagtgtttaggtatagggttagtttagttttttttttttttaaaagagtggttttgttttttttattattttaaggttgtagatttttttttattattttttttttttttttttttttaaaatggtagatttaaagttttttttttgatttttttttattgtttaaatttttattttattatagtgttttttagttagattattattttttataattttttttattgtgttgaaatggtttattgagtaatatttttattatttttttaattgggaaatttttgaaatgtttttagagtatttttgacgtttgaagaagttatatttttttttttttttttattaaataaagtaaagttaaattattatttggaaatagtggttattttttattgattttttttcgatatttagttaatttatttaatatgttattgggttttcgtttttaattttattttattttttattatagagtttattacgtttttttagattatcgtttttaatatatttattgttttttaaggtttttattttagtttttttttgtggttattttttttagtgtttagatgattttttgggtgagggagatattggggtatttttagaggttggagtaggttttttgttgtttttggattttggatagatggtttagtaaattgtggggattaggtgtagattttttgtttttttggagttttgggttttttttgagagtttgggtggtgttttttttacgtttttagaggtttttgtgttttttatttttttttaaaagcgggttgtgttttttttttattttttagttttttttatagaggaggaagataataaatatttgttgaattgaaagtagagattgtttggttttttagattttttcgttatttttttttttttttattgttttaggaaatttattttttttttattttttatttatcgtggggttttttttttttttatttagggtttttagtgtttttttttttttttttttttttttttttttatttaaatttttttttttttattattagtattttttattttttagatgttattttttttgggagttatgagtttcgattttttgggtttttgggatatttggaagtttgggaaggttgggatataataattttaattagatttttgttagttgagtaggaggttagttgggcgttgtttttggagttgggggtggagagagtaaaggattgagaggatgggagcggggtagggagtgtagttaagtagggtgatttattggtttagattaagaggtttagtttgtggtagaatagagttgttagtggtttttttatttttatattttttgttttgttggggtttagagtgagagtgtgagtaatatggtttttaggtgagggttgagaaggtagagtgttttagtgggaaagaggagtcgtttttattggagaagagagagaaagtggagtgtgtggtggggtttatgcgatttaagttttgagataggtagggagaggttgaggcggacgaagttttcgtattttaaggagggtagagtggattgtgtttgtttttgtaggagttttattttttattttaggttattttttagagtttttgtttggttgtaaaggaatttatttttattgtagtatttaatttatttttttttattagggtggtgttgtttggttttgaatttagaattgttgaaattttaagtttggaattagtaaaaatgtattatattgattagaaagggattgaattatttttggtttagtatttggtttttgatttgtagttaatggtaggaatcgaggtttttagatgttttatgaatgggaattgtagggagagaaggttttttgatgtggtgttttttcgagttttttgttgtgttttaaattaaaagtttgtgtaaaatttatgtatgttatttaaaaaggtttttgggttttatttattgttagttttggagaggagttttttatttttttagtggttaagttagtaggggtaggtggggaggatatagtagtagaattagttaatagtttatgtttagattttgggtagttagggaagtttatttttggggtttttcggaagttatggagagaataaagttattgtatttttataataaaatttgtaaatatatttaaaagttaataaattgttaatgaatttttatatttttatcgtttagttttaataaggattaagttttggttatttgatagtagtatttaaaggtttttttttattgttatttggaaatagttatttttttttaaggttttttatattttgtggtatatttgattattagtagtaggtagaatgatgtttttaattttaatattattaaagatgtttatattttaatttttggaacgtaggaattaggttatatggtaaagggaaattaaggttttagatgggattaaggttgttattcggttgattttatagagattattatggattatttaggtgggtttagtgtagttattaggttttttaatgtggatatgggaggtagaagaggaagtttgagtgatatagtgtaagaaatggttgattttggttttggagatggaggaaggggattatgagttaaagaatataggatgtttttagaaggtgaaaaagtagggaaagggatttttttttgaggtttttagaaagaattatagttttgttgatatttttattttaatttattgagatttgttttagatttttgatttttaaaattgtaaagtaataaatttatgttgttgtaagttattcggtttatggtaatttgttattgtagtagtaggaattagttagtattttataaggatggtatttaggtttatttttttagttagatttagggttttatgtaggagtagttttttagatggggttatttttgtattttagaattttttgtaggttggggttaaggtgaaggagatatgaggatgtatgagaaaggggtgttgggaggaaataatttagtttttaaaaagaaataagtgtttttgttgttgagagaggtaattaagagagtgggattttagggtggaggtttttgtgtatagagaagtagggttggggaggttggtaattagggatgagttgtgagttaggatatttgggttaagaaggggtagggaggttaaggaaaggagttagggcgggagatatttagttttttttgggatatttatttaagtgatatttgttgttatagattatattaggaatgagggtggaatgtggaggtttattgtttttataattattagtttagtttgtttttgttgttttttattttattattaggataaagggttggttgttttggggttgagggagatcgggtgttgagtaggatgtagggtcgcgtggtagggagttgcgtttttttgggtttgtttttggtttgtttttattttttaggtatggaggtcgtgatgtttttgggtaggagggattggaggttttttaggaaataggaattaaggaaaggggtaaaggtaggagggtatatatttaggtttttgagggaaaaggaagaataggtataggggaagtaaagggaattggggattcggggattggagattattggttgttttatttttttttttttttaggtttttttgttcggagtatcggtgttgtggaggagaaagttttttaaaatttggggattaatttgttttagttcggataatttttttttattggtttttttaattttgaatattcgtagttcgttttggattttaggtttaatgatttggtaagggtttttttgaagtttagcgtgtttgtattagatggttttttatttgtaggaggttttgtagtgtagaggtggtttttatcgtgggggttgtttgttatggatttttggttttttgaggatttttggtagatgatggttgttgcggttgaggatcgtttgggggaagcgttgtttgaagaatttttttatttttttagtgttgcggttttcgtttcgggtagtggttttttgtttggggagttttttttcgatgttataggttttttatttaaggttttatttttttattaggattcggagtttagacgattgtttcgttttaatttattgggagtcgggggaaaaatttttttttaacgttttttttggttttttatttatagggttttgtttgattatttttggggtattttgaattttagtgtgttttggggaggtggaggttttgggattggttggggaacgaggtttatgttatattttgagggaatttggggtattaataattaatttttaggtattagttggggaaatattaatcggtatttaggaggtagttggggaaatattaatcggtatttaggaggtagttgggggaatattaatcggtatttaggaggtagttgggggaatatttatttatatttaggtattaataatttatttttttttggagtttttcgtttttttggttttttttggaatattttagttggtttttttaattttttaagttttaggttgtagtggggttagagtacgatagagggaaatttaatattgggagttagagttttgttttcgttttttgttgtgtgggtttaatttaggttttgttagtatgtttttagtattatttttattttttagtgttttttttgtttatttttaataaaataaaagtatttatggaatttgtttttttttggtttttttgtttttgggtataagttgaagtgagtttgggtataagttgaagtgagtttgtttatttttgttttttagttatttttacggttttttaggggtttttgtagacgttgttttgttatttttattttttataaaggattagtgtttaagtgtttgagggtggagttttagttttatttcggttaggtgggagagttgttttagaattgtgttggaatttgaaagggggaggagggatagtaggattaattgagatggtatttgtagtagggggtaaggatgaggttttagaaggcggttttagggttaggtggataggattttttgtaatttatagaaataggaagttaaaagtcgtaatgtttacgttttatttgttttttttttttcggaaagttaagttttttggaagtggaggtatatcgatttttttttttataggtattatttagtatattgtgttttatagaattatagattttgaagagttgttgagtaaatagtagatttcgataaaggaaaagagaaaagggagaaaggaaagggagaaaaaaattttgaagttaataattttatttggggtggtatttgatgtttttatttttaagtgatgatatagttttagtttttggttatagtattgttttttttgtttttttttcggtttttttaggagtttaatatttttatataggagttggagtgacggtagcgaagggttaggttataaaagtacggaagaattagtaggtgtgggttggaggtgatttgggtttggatttttttttttttgtgttatgtttgtagtggtttaggtgtatgtattttttatttagttaggtttttgggagttgggtagtttgtgggaggggagaaaggagtaggaaaaatattagaatttaaggggtagggagttgtttgtttgtttgtttgagtggtagatgggtatttttggagaagatgttcggttttagcgtttgttataaggttttattttatattgagaagttttttttggaatattttttttagagtttattttttttattattaagtatatttttttcgttaatattttaatttttttatttgattttttttttagtttggatttttttggtttttttttgttttagggtaaggggttttatgtttgtttttagtatttgttttttttattagtttaaggttattttattaagtttggagttttatttttttttgtttttttttttggtggttttttttgtatagttatttttattcgtatatttaaatttggtgttaatagttttttgttttgttttatagatttattagagtataagtattacgaggataggggttttgtttttttagtttattgttgtatttttagtataaagaatagggtttggattagggtaggtatttagtaggtacgaaggaatggttgattttttttttttgttttttttttttttttattatttttttttttttatttaatttttgagttatgcggttatatttagagtttaatttatatttcggttgtagtttttttagagttttattgatattttttaataattttatgaagttttttttagtattaaaatgttttgtgcgttttattatttaatttttattattttttgtgaggaaggtattataagatttttgcggttaggtacggtggtttatatttgtaattttagtattttgggagaacgaggtaggcggattatttgaggagttcgagatagtttagtttaatatggggaatatggtgaaattttatttttattaaaaatataaaaattagttaggtatggtgtttgtaatgttagttatttaggaggttgaggttggagaatcgtttgaattcgggagttggaggttgtagtgagtcgagatcgcgttattgtattttagtttgggtgatagagcgagatttcgttttaaaaaaaaaaaaagatttttatagatggaggaattgagatttagagggattaagtaagttatatagggttataagtgataggggtggtgatttaaattttattttttttattatttgtttagggagtatttaagtataatatgtaattaatagaaataataacgaatttttattatatttatatataggttaggttttggataaggggtttgtatatatatttttttagtaaatttttataataattttattgggtgggtattgcggggtatattgtatagggaagatattgaggtttagagaggatggggagttgaggtttatatataggtaatattgagttagggtagtgaagtttatttgatgtttggtgttgatggtttagggaagatggattttaatagtggagggttttagggggatgtggttagtttttttagggtggtttttggattaacgttagttgttgtttaaaaaatggtggaattgggtatggtggtttatgtttgtaattttagtattttgggagttgaggtaggaggattatttgagtttaggaattttagattagtttgggtaatatagggagattttatttttataaatagtaattaaaaaattagtttgagtatttaaaaaaaaaattaagagtaggtcgggtatggtggtttatatttgtaattttaatattttgggaggttaaggtaggtggagattagtttggttaatgtggtgaaattttatttttattaaaaatataaaaattagttaggtatggtgttgtacgtttgtaattttagttagagggaaggttgaggtataagaattgtttgaatttgggagatggaggttgtagtgagttgagattgtgttattgtattttagtttgggtaatagagtgagattttgttttaaaaaaaaaattattattataagagtaaaaataaattttaaaaaaaataaaatattagtttggtatggtgttatgtttgtggtattagttatttgggaggttgaggtgggaggattattcgagtttgggaggttgaggttgtagtgagttatgattattttattgtattttagtttgggtgatagggtaagattaaaaaggaaaaaaaaagaaaagaaaagaaaggcggtttatatttgtaattttagtattttgggaggttaaggagggtggattatttgagattaggagtttaagattagtttggttaatatggtgttattttgtttttattaaaaataaaaagttagttaggtgtggtggtgggcgtttgtaattttagttattcgggagattgaggtaggagaatcgtttgaatttgggaggtagaggttgtagtgagttgagattgtattattgtattttagtttaggtgataagagggaaattttattttagaaaaataataataataataaaaataatatttaaaaattaaataataataattataataaaaagagagggaatgtttttagtaatttgtgatatgagaaaggttttaatgtttgtaatagggattattgttggtatattgatttttatatttttattagtggttaattagtggaagtggtggttggagtagtaagagttatttattttttttattttaggagggcgtttatttagaagttaggaaatagaagttttttttttgttatataattttttgtgttaggttattttaggtaagttattgatttttgtggattttcgtttttttatttgtaatatgggatgaaagtagatgtttagttttttttataggattattaggaagtttaggtaagataatgataaggtgttttagagattggaaaattttgagttatcgtaagggatagattttaatgtagtgcgttgttttagtgaggtagttttggtaggattataggatagtttttcgttttatagaggagggttggtttggtgtagaggttgtagttgatattatagtcgattgataagttgatgtgatgttttgtattgggagttatatttgagagaatgattttaagattaagaggaagagttgagttggttttttatttaaatattttattttttaaataaatagtatttatttagttatttgttagtaaaaaagatattttttatttatatatatattgttgggtgataataataatagttttttttatgtatttattatgaattaaatgttataaggttattttagtttttagaattttatgatgtgtatgacgtgtttatttttttgtttgtttgtttgtttgtagagatgggggtttcgtttgttgtttaggttggttttgaatttttggttttaagtgatttttttgtttcggttttttaaagtgttgggattataggtatgagttattatgattagtttaaagtgaattaatgtttgattttttggttagataagttttattgtggaaaggtggtagtaataagttgtgaaataattttgagattatttagttttttttggttttaggatggtagttgtgattgatgtagtaggtgtttttttttttttttttttttttttttttttttttttttttttttgagacggagtttcgttttgttgttaggttggagtgtagtggcgtgatttttgtttattataattttcgattttttggtttaagcgatttttttgttttagtttttcgagtagttgggattataggtatgtgttattatttttagttaatttttgtattttttagtagagacggggtttttttatgttggttaggatggtttgattttttgatttcgtgattcgttcgttttagttttttaaagtgttgggattatacgcgtgagttatttcgttcggttagagggttgtttttttagtatttttttttttgttttttttttttttgaatttcgtatttaaattattttttggttatttaggattataattttttttgatttatttagttaaaatttattttttttgagtttttttgtttattgtgatatttttatatgatgaatttaggagaattaattttgtttatgattaataggtgtaaagatgatgagtttaggaagataaaatttatttggtatgttagtggttttttaaatatttgttattagtttttaagtttaggtgtttttttttttttttgggatatttttttagtgtttaaatgttattaaggtatttttatttaatgtaattttgttttttttatgaatttattaaataaatagtatttaagtattaaatatttttttatttatatattatgtatataattaatatatagatatttatggatttaataatttaaattgattaaaatatattattgattttatttatttatttatttatttatttatttatttatttatttatttttttgagacggagttttttttgttatttaggttggagtgtagtggcgtgatgtcggtttattgtaatttttgttttttaggtttacgttatttttttgttttagttttttgagtagttgggattataggtgtttattattacgtttggttaatttttttgtatttttagtagagatggggttttatcgtgttagttaggatggtttcgattttttgattttgtgatttatttattttagttttttaaagtgttgggattataggcgtgagttattgcgttcggtttaaatattgattttagatttaaatttatttaagtatttaattaaaattttttatttagttgggtatagtggtttatatttgtaattttagtattttaggaggtcgaggcgggtggattatttgaggttaggagttcgagaataggttgattaatatggtgaaattttgtttttattaaaaatatataaattagttgggtatggtggtaagcgtttataattttagttatttaggagattgaggtagtagaatcgtttgaatttaggaggtagaggttgtagtgagtcgaaatcgcgttattgtattttagtttgggtgataagagtaagattttattttaaaaaaaaaaaaaaaattttgtatttaatatataggatttttttaaatgtttgaaattttttaagaagtaaatgcgtttttttttttgagatggattttcgtttttgttgtttaggttgtagtgtaatggcgcgatgtttgtttattgtaatttttgtttttcgggtttaagtaatttttttgttttagttttttaagtagtagggattataggtgtgtattattatgttcggttaattttttatttttagtagagatggggttttattatgttggttaggttggttttgaatttttgattataggttatttatttattttggttttttaaattgttgagattataggtgtgagttattgtattcggtttacgaatgtaattattattattattttatttttattttttggagatagagtttttttttattatttaggttgaagtggagtggtattattagggtttattgtagttttaattttttgagtttaaggagtttttttattttagttttttaagtagttgggataataggtttgtattattgtatttgggtaatttttaaatttttatagagatggggttttattatgttgtttagattgattttgaatttttggttttaaatgatttttttattttagttttttaaagtgttgggattataggtatgagttattgtgtttagtttggaatattaatttttaataattatttgtatatagagaagtattattataagaattaaaaattaggtgagtaattatagtaattggatttaattttatattattaaaggaaatattgaggagggtaggagagatagttttgaattgtgacgtttttttcgttttttttggtagtgtttttgtagcgtggaaagagagtttttgtattttggggagggagggtatggggtgggggattttatattgaatttattgttgtattgttatagcggagagtaaagttatgttgggatcgatcggtatttgtatgtggaggggggtatttgggttagttttagttagagggaaattatttgttttagtggttggaatttgagtttttttgtaagttttattattatgggttaaagtgttttggtgttttaggtaaatttgaaaggtagtttaggttggatgcggtggtttatatttataattttagtatttggggaagttgaggtaggagggatatttgagtttaggagtttgagattagtttgggtaatataaggaggttatatttttataaaagaaaaaaaagaaaaggtagtttaggatttaaggattgtaatttttagataatttttagtgttcggttggatttatagttaatggattagggttgtatttgatttaggtagatattagtcggtatggttaagggagggtttgtgttattttttttttaattttaggtagtgtagtttttagtaacgaaagtgattttttttttttgtttaaggagagatgagtaacgggtaaagaggatttggttttgtattttggatattagtttagttatagtaggatagggtattgggttaagttatgaggtttttattttaggtttaatttttagatgttatttttagatatttgggttaaaagggaagttgttgttttgaagagaagggtttagtatttgtaggatttattatttgttgattaaagagtttttgggttttgtataattagtagtaataattaggtagtatattgtgggttttgggtgagattttgagatatgttgtttttagtagtaatttagtatatttttagttatggtggttatggtgaaagatttttgtagtttgagaaaagtagagggaaaagtaaaggggattttgttttgtattttaggtattagtttaattatggtagggtagagtaataagtagttttttggagtttttaaatttaggtgtagattttgttttggatttgtttttttggtttatggtaggtttagaggggagtttgttgttttgaaaggtaagttttaggtttggtaatatttattataagttgatggaagagtttttgggttttaatttttatttttattttttcgagacggagttttgttgttattttgattggagtgtagttgtattatttgggtttattgtaattttcgttttttgggtttaagaggtttttttgttttagttttttaagaagttgagtttataggtatttattattatatttggttaatttttgtatttttagtagagatagtgttttattatgttggttaggttggttttgattttttgattttaagtgatttatttgtttcggttttttaaagtgttgggattataggcgtgagttattatagtcggttatttttgggttttaagtgaatattggtggtggattggtagaattgttgtggattggtggtggtggttgttatagggagaggtttttttgtttaaggaaaggggagggatgagtgggagggattttgtattgtggtgttagcgttcgtttagttatagtagaatagaatattaggtaaattattaaagtttttgattttaatttttggtttttagatagtatttttggagaagtttttagtttagaggaatttgttgttttgaagggaaggttttggtaaagatttagtgttgtgttggttttagatttgatttagtgtagttttagtgacggttataggggtgtttgtgttattatatttttagttttaggtggtttagtaagagagagagagattgtatgtttgggagaaagtaagtaaaaagaataagagtttatgtttgataatttagaaaatttttttagtttttatttaagattattaaggtagtatttttaagagtttgtaaaattatagtattattgggttttttaagaaggataggtataaataagtttagggttgtgaaggttataataaatatttaattttttaatgtttagatatcgataaacgtttataagtattaatattattatgattttattaaatgaattagataggttattagggattaattttggagaaaaagagatatatgattttttagatagattatttaaaatagatgttttgaggaaattaaaagaaatttaagggtcgggtacggtggtttatgtttgaaattttagtattttgggaggttgaggagggcggatcgcgagatcgggatcgagattattttggttaatatggtgaaattttatttttattaaaaatataaaaaattagttgggcgtggtggtacgtgtttgtagttttagttatttaggaggttgaggtaggagaatcgtttgaatttaggaggtaggggttgtagtgagtcgagattacgttatcgtattttagtttgggtgatagagtgagattttatttttaaaaaaaaaaaattaagatagtatagagaaagaatttagaattttattagataaatttaataaggagaatgaaataattaaaaagaattaggtagaaatttaatagttgaaaaatataatggatatgttgaagaatgtacgatttttttgaaaatttttttgaaaatttttttttttttttttttttttttttttttttttttttttttttttgtgggggggatagagttttattttgttatttaggttggagtgtagtggtataattttagtttattgtaattttcgttttttgggttcgagaggtttttttgttttcgtttttcgagtagttgggattatagatgtttattattacgtttggttaatttttgtatttttagtagagatagggttttgttgtgttggttaggttggtttcgaatttttgattttagttgattcgtttgttttggttttttaaagtgtttggattttaggtgtgatttattgtgtttagtttttttaaaattttatttattttaattttttagaaaagatagaatttttgaattgtagaattaattaagtagaagaattagtgagtttgaagataggttttttgaaaatatagagttagaggagataaaagaaaaaataataaaaaataatgaagtatgtttacgagatttagaaaatagttttaaaagggtaaatttaagagttattggttttaaagaggaggtatagaagatatagagatagaaagtttatttagagaaataatagaattttttaaatttatggaaagatattaatatttaaataaaagaaggttatagaatgttaggtagattaaatttaaagattattttaaggtatttaatgattaaatttttaaagcgttaataagtttggtagtagattttttagtggaagttttataggttaggagatagtggtatgatatattttaagtgttgaaggaaaaaaatttttattttataatagtatatttagtgaaaatattttttaagtataaaggagaaataaagatttttttagataaataaaagttgagggattttattaatattagatttgtttgataagaaatgttaaagtgagttttttaatttgaaagaaaaggatgttaatgaatgagaataaattttattataaaatttattggtaatagtaagtatatagaaaaatatagaatagtataataatttaatggtggtaggtaaattatttttgttttaaagtagaaagattaaatgatgaattaatagaaaataataattatagtttattgtagtattgtttataatagttaagatttggaagtaattaaagtgtttattaatagatgaatggataaagaaaatgtatatatatataatggagtattatttagttataaaaagaatggtattttgttatttgtaataatatggatggaattggaggttattatgttagatgaaataagttaggtatagaaagataaatattatatgtttttatttatttgtgggatttaaaattaaaataattgaatttatggatagagatagtagaaggatggttattaaaggttgggaagagtagagttatgggggatacgtggggatggttaatgggataaaaaaaatagttagaaagtatgaataagatttggtatttgatagtataataggaggattatagttaataataatttttttttttttttttttcggatggaatttttttttgttgtttaggttggagtatagtggtatttttttagtttattgtagtttttattttttgggttttagtgatttttttgttttagtttttcgggtagttgggattataggtatgtattaatatttttggttaatttttgtattttttggaatgatggggttttattatgttggttaggttagttttaaatttcggattttaggtgattcgttcgtttcggttttttaaagtgttaggagtataggtatgagttattgcgtttagttgataataatttaattgtatatttaaaaataattataagagtataattgtattgtttgtaatataaaggataaatatttgaaaggatggatatttaattttttatgatgtgattatgatatattgtatgtttgtattaaaatattttatgtattttataaatatatatatttataacgtatatataaaattaaaaaattattaataaaataataaaatgaggtcgggcgtggtggtttatttttgtaattttagtattttgggaggttgaggtaggcggattatttgaggttgggagtttaagattagtttgattaatatgtagaaattttatttttattaaaaatataaaattagtcgggcgtggtggtgtatgtttatagttttagttatttgggaggttgaggtaggagaattgtttgaagttaggaggcggaaggttgcggtgagttaagattgtgttattgtattttagtttgggcgataagagagaaattttgttttaaaataaataaataaataaataaataaataataataaaatgaaataaaaataaataaatgtataaaattagggagtagtttttagtatatttatggagttataaaattaatattataattaattttagaatatttttattaattttaaaagaaagtttaaatttatgagtagttatttttaattttttaatttttttttattttattttagttttaagtagttatttatttattttttgtttttaaggatttatttattttgtatattttatataaatggaataatataatatggtgtcgttttgattggttttttttatttagtataatgtgtttaaggtttatttatgttgtagtatatattagtattttatttttttttatttttaaatttatttttattttagcgtatggttgtatatattatattttattttttatttattcgttgagggatatttaggttatttttattttttattgttgttgttgttgtcgttgttgtttggttattatgaataatgttgttatgaatatttgtgaataagtttttgtgtagatatagatttttatttttttgggttataaatttagaagtaggattgttgagttatatagtaattttatgtttaatttttggaggaatggttagattattttttaaagtgttgtattattttattgtttaatagttgtgtatgagagtgttaatttttttatatttttgttaatatttattatttttttttttattatagttagtttagtgggtgtgaaattatattttattgaggaatataattgtttttagttaggtatatattttttatataaattttagaattttgcgggttaagtacggtggtttatatttgtaattttagtattttggtaggttgaggagaatggattatttgaggttaggagtttaagattagttcggttaatatggtaaaattttgtttttattgaaaaaataaaaattagtcgggcgtggtggtatatgtttgtaattttagttagtcggaaggttgaggtatgagaatcgtttgaatttaggaggcggaggttgtagtgagtcgagattattttattgtattttaatttgggtgatagagcgagatttcgtattaaaaaataaaaataaaaaaataaataagaattttataatatattttttttttttaatataatatattttaataattttttgattattattatataatgaattttttttttattatgatatattgatttgatttgttagtagtattaaattttatgtatattttatttgtattttattataattagtagggtaatttaaatatttaatattttagaagatgaagaattgggttgatttggttagtttttttttttagtgatatttttggttaatttattgttttggtatttattattgaaattttttttttttttattattgtttttgatattattttatgttagacgtttttatttttgttaatatttatatttatagtagggttgttattggcggtgaattcgtaggtgtttgtagtaattttaatttttatttttttagaagaaagaatttgattgaggggtataaggtaggagataacgaggtaagttttagagtaggagtgaaagtttattaaaaggttttagagtaggaaggaaagtatatttggaagagggttaagtggacgattttagagattaagtatgtggtttgattttttgatttgggtttttttttgtttgttttttgttttttttttttttgagatggagtttttttttgttatttaggttggagtatagtggtgtaattttggtttattgtaattttcgtttttcgggtttaagcgatttttttgttttagttttttaagtagttgggattataggtgtgtattattaagtttggttaatttttgtatttttagtagagacggggttttattatgttggttaggttgattttaaatttttaattttaggtgatttgtttattttggttttttaaagtgttgggattataggtgtgttattgtattcggtttgatttgaggttttatatattgtatgtttcgggggttttggtgtttttttttttttgattttttttttgggttgggttgtttatatgtgtagtggtttgttagtttttggaaagggcggtatgtatagtgtgtttattggagttgtacgtatgtttatttgaggcgttttttttttgttagtttaaaattcgtagaggaaggatatatattagttaaattttatagttttgttttttagtgagtatgtttgagtttattcgtttaatttttgagattttattaggaagttgttgattattagttttaggttttttttatttattgggatttgtttgtttttggcgttagttgttattagttattattttagagaaatagttaataatcgtttggttattatttgatgttcgtttggtatttttggtgggtgtgtgtggtaggaagtttttttttgttttgttcgtgtttgattagttgtttattataatagggttatttggtttttttagtattttttgtgggttttttgtttatatagataaaagtaagtatttatttttgttttataaatagatatataattaatagaagagataaaatgaatagttttttttttattaaaataaaattttaaaatttaatttttttttattatagttattttttgtgttttttatgtgaatttttatttgttattatcgtgattttatggtttgttatagatttaatttattttaattaattataattattatttttttttttatttttttttttttatgttcgattgttaatttgaataatgggagttttttgaaattggtttttttgtttttttaagtattgtttttgatttattttttttttttttttttttttttttttttttttttttttttttttttttttttttttttttttttttttttttttttttttttgcgatagggttttattgttgtttagattggagtggtatagttatagtttattgtagttttgatttttttagtattagatgatttttttattttagttttttatatagttgggattataggtatgtattattatgtttagttattttttgtattttttgtagagatggggtttcgttacgttgtttaggttggttttgaatttttttgtttaagtgatttgttcgttttggttttttaaagtgttgggattataggtatgagttacgtgtttagtttgttttttatatttttgaagttatttttgttttatggtaataatagaatatttaagttttgttttgattttttttttttttgagatatggaattagttgttatttaagttttgtattttaaggggttttagtttttataaatgaaaaatagtatttgaaattaaaggttaggttttggggttttatatgatagttagtgataaaattattattttttttgttggttatttttttgtttgtttgtttgttagtttgagatagagttttgttgtgttgttaggttggagtgtagtggtgttattttggtttagtgtaattttaattttttaggtttaagtaatttttttattttagttttttaagtagttaggattataagtgtattattatgtttggttaatttttttttttttttttttaaatagagatagggttttattatgttgtttaggttggttttaaatttttgggttgaagttatttgtttattttagttttttaaaatgttgggattataagtgtgatttattgtgtttggtttatagttggttattttttaagatagacgttaatgttaaatttgttaatttaatatgttgtttgttgtattttatttgtattagagagagtagggtagatttattatgaaaattttttatattattgagagataatgaagggattatatttaggtttatgtaggaatgaagtgaaggaatatgtggaagttaaagttagtgtggggaaggttggagagtgtgaattgggtaatattttacgtaaggtgaggttagttgggaaattagtttattgtagagattttgaagttataagtttgagataaggtgaagtgtttagtgatttttttatttgttatttttatttaataaagatttgtttgagttatagttatttaggatgtgattatgtgttttttatttttaaaagatacgttgaaattttaatttttggtattttagaatgtgatttgattaggaaatagggtttttatagaggttattaagttaaaatgaggttattagggtgagttttaatttaatagaatttgagtggagtttggagtatttgtaggatttaagaaagtgattatagagaggggttaaggggtgggggtgttggtgttgatattgtagagttttttaggtttttttagggatttggtattttatttgtatttgaagaataagggttgtattgatggtaagttaagatgtattgtgtttgttaggggttgttaagttgttaagagaggaaatgattttgtagatggttttgtagggtttggtatagggcgagttttttgtatgagggaggtgtttttatttaattgttaaatttgttttttgtttatgttttttttttttatatggggatgtttatggttttttgtttgggtggtgatagtatttttttaattggttttatatttataggttttgcgttttttagtttattttataagttagtttattagatttttattttgtttaggtattggttgggtgtagagtttgtagtttgtatagaaggtcgtttttgtgtagttgattgtttttttaggttttgtttgttttttgtttttatttttatttttgtttttgttttttgttgggtagatattattggtggaatttatgaatatttgtagaattaatgattgaaggtattagggttttggtagttattttattttgtatgtaattggagttttttattattttgtattttggttttgtgatttgtttattttttttttttttgtttgttaaatggaatatttatttgttatattttagttttagaagtttttaataaaatttagggaattttagaagggtatagtaagaggaatggaaagaggaaagaagttaaaatgtatttggtggttagacgtagtggtttatggttgtaattttagtattttgggaggtcgaggcgggcggattatttgagattaggaatttaagattagtttggttaatatggtaaaattttatttttattaaaaatataaaaattagttgggcgtagtggcgggtaattgtaattttagttattcggaaagttgaggtacgagaattatttgaattttagaggtagaggttgtagtgagttgagatcgtattattgtattttagtttgggtgatagagtgagattttaattttaaaaataaataaataaataaataaataaataaatgtgtttggtttaggggaaagattaaagttattgaataatttttgatgttaaataaaattataattttaaatagatgtaagggaaattatgaattagattagaattaaagatgtatgttttaaattattggaagggttgaaataataatatagagagtaattttttcggtgaaaattaggggaaaaaatagtatttagaaaaaataaagtaatatagatataaaagtttattttttttttaaatagagtattcgtgttttatgaaattgttggtgataatttttaaaaagtgtatttatggagaaagttttgatgagatattatttcggcggttattttttggtggtagaagttttttaggattttttaattttgtattttgtatttttataaagatttgtatagtattgggtttataataaaaataaaataaatataaaagtttatttatttgtaaataatttattgtttaagttttttttgatttttttattgaatttttaggttgatggtgatttttttatgatattgaaggatattgaataattataattattgtaattaatgggtttagtattaagttttttaagttttattttttttatttgtaaagtggggatagttagagtttttatgtgataggtttgttgagatgatttaattaaatatttgtatacgaaatttttagtatcgtgtttggtacgataagaatttaataataatttgttgttgttattattattattataatttattttatgttattttttgagtgatagagtgttattttgttttttaggttggagtgtagtggtacgattttggttgattgtaatttttatttgttggttttaaaggatttttttgttttagttttttgagtagttgggaatacgttttcggttaattttttttttttttttttttttgagattcgttttgttatttagtttagagtgtagtggtgcgatttcggtttattgtaatatacgttttttaagtttaagcgatttttttgttttagatttttgtatagttgggattataggtattcgttattatgtttaattaatttttgtatttttggtagagatggggttttattatgttggttaggttggttttgaatttttgattttaggtgattagtttattttagttttttaaaatgttgggattataggtgtaagttatcgtgtttagtttaatttttgtatttttagaagagacgggggttttattatgttgattaggttggtttagaatttttgattttaggtgatttgattattttggtttttaaaagtgttaggattataggtgtgagttattgtatttagtttttaatttattttaattttaaatatttttttaaggtaggtattatgagttttataaatgatgaaaatatggtttagagaggttaagtaatttgtttaaagttatatagttagtaaagggttttttaggatattatatgaaagttaattatttacgaatgaaagttgtggggagtttgtgtatagtgaatgagaggtattaattggaaaagatattgtagatggtgttaaggaaattggggagtaaataaatttaattaaagggagttaaggggaagtatgtatggataaagattagatttaaggaagtaaaaattaaatttatggtattaggcgttaattgaagaaagaatgtggatgtagaagagggtggtttttatggaatttagaaaagcggggtttaagggataagaattatgagttgtttagttattgttttttgtaggggaatatgaagataggtatgttttggttatgagtattttgttgtaatttattttaattttatttttttaattttttttaatagagatagggtttggtatgttatttaggttgattttttgggtttaagtgatttttttattttagtttttttaagagattgtaggtatgagttattacgtttagttataatttatttttaattagtagttttaaaatggttgtgatattaagtgtataataatattgaatttatagttatgttttatatattaaaagatgggtggagagagattttttttgttagtttgatggaagaatatgtgtgtcgtttgttttatgtatattagaatttatttttgaattaagttagattagtggtacggatatatagtatgggattgtattgatttgattgattttgtcggaatatggtgttattagttgtaataggaatatcgaagaaatgaataaattttatgaaaatttgtatttatggtagtggtgtggttgagacgttgtttattttattatattttttttggttaagggagattagaagaaaattgttttttggttttagggaaaggattagttgtgttattattgcgggatttttttttagtttagttaaagacgggttttttgttttatagttacgaaaatttaggttcgtagataatttgaatggtgaatgagatgggttttattggatgaaaaggaagaaaacggagaaatagggattgtcgttaggttagagtttttattagagcgttttttattcgttatttaaattttaggatttatatattaagaagaggggttaggttgtttttcgttgtaaagggtataaattttttgaggttttattttagtgggtaggttggttggtatttttttagggaattttttttatttggttgttttattatttttgagattttggatattggaagttatgtgatgattgtgtttttttttttgaattggtttttagagagtttagttttaaatttgcgatttttatttttagtatagtatgatgtttatattaattttattggttttatttgatttttttaattttttatttgttttcgtattttttttttttttttttagagattttggggttttatttatagtttattgtagttttaaatttttgggtttaagtgattttttagttttagttttttgaggaagtagttaggattataggtatgtgttttaatagtttggttaatttattttattgtttttttagagatgagatttggttatgttgtttaggttgggtagttttaaatttttggttttaagtaatttttttgttttagtttttagagtaggtggggttataggtaggtattattaggtttagttttagttgtaatttttaattttgttgtattgtgtttaagttattttagattttgtttaaaataaggttggtatagatatatataatgttttatttttggattgggttttattatgatttggatgaaatatttttaaaatatttattttttttaattttgattttttggttatttagtaacgtattttgattggtagttaatttttttttttaggtattttgttattagtttatttagttattttgttattttattgtttttatttattagtttttatattttattgcgtttttttttgtttttgtgtgtttttttttatgttatttttttaagtttatattatatttgtgtaatgtggttttttttttaatttttaaattattttgaagttaattttattataaatttttttttttagttaggtgtagtggtttatatttgtaattttagtattttgggaggtcgaggtgggtagattattagaggttaggagttcgagattagtttgattaatttggagaaattttgtttttattaaaaatataaaaattagtcgggtgtggtgatatatgtttgtaatattagttattagggaggttgaggtaggataattatttgaatttgggaggcggaggttgtggtgagtcgagattatgttattgtattttagtttgggtaataagattgaaattgcgttttaaaaaataaaaaatttaaaaaaataattaattaaattaattaattattattattattattatgagataaggtttggttttattatttaggttggagtgtagtggtataattatagtttattgtagtttggatttcgttggtttaaattatttttttattttagttttttaagtagttgaaatggatacgtgtattaatacgttcggttaatttttgtatttttagtatagatagggtttcgttatgttgtttaggttggttttaaatttttgagtttaagtgatttatttgttttggttttttaaagtgttgggattataggtatgagttattatgtttggtttaaaattttttttattgtggtaaaaataaatatatatataatttagttataaacgaggaattatattttgatatatgttataatatggatgaatattgaaaaaaaattatgtaaaatgaaatgagttagaaataaaaggataaatattgtatgattttatttatattagatatttaaaatggggaaatttggtttgttagtatagtagggaaaaaaataaataaaaataaaataggaaaattatagaggtgaaaagttaatttagttaggtgtggtggtttatatttgtatgtgtgtgtggtgtgtgtgtatatatatgtgtgtgtgtgtgtgtgtgtgtgtatgttatatatatgaaaatgtatataaggtaagattttttatttaattattttattttattttattttattttatttttttaagacggagtttcgttttgttgtttacgtttgagtatagtggtacgatttcggtttattgtaatttttattttttaggtttaagtaatttttttgttttagatttttgagtagttgggattataggtgtttgttattatgtttggttaatttttgtatttttagtatagatggggttttattatgttggttaggttggttttgaatttttgattttaggtgatttttttatttcggttttttaaagtgttgggattataggtttgagttattgtatttagtttaattattttaaatgtataatttattggtattaattatatttgacgttgttgtgtagttgttaattattatttgtttttaaattttttttattattttaaatagaaatttattatttattaagtaataattttttattttttttttcgtttagtttttggtaatttttaatcgatttatttttttttttttttttttttttagaggtggtgggggtgggtgttttattatgttgtttaggttggtttcgaatttttggttttaaatagtttttttgttttagttttttagagtgttgggattataggtatgagttacggtatttggttaaattgattttttatttttatgatttttgtattttatttttatttatttttttttttgttgtgttggtaaattagatttttttattttaaatatttaacgtaagtgaaattatataatatttgtttttttgtgtttggtttattttattttatataatttttttaatgtttatttatgttgtagtatgtattagaatgtaatttttgttgggcgcggtggtttatgtttgtaattttagtattttgggaggtcgaggttggtagattatttgaggttaggagttggagattcgtttggttagtatggtgaaatttcgtttttattaaaaaaaatataaaaattagttgggcgtgatggcgcgtgtttgtaattttagttatttaggaggttgagataggagaaatttttgaatcggggaggcggacgttgtagtgagttaagattgcgttattgcgttttagtttgggtgatagagtaagattttgtttgtaaaataaaataaaataaaataaataaatagaatgtaattttttttttatggttgaataatagtattttgtaatatttttattattgtgtatttttaaattaattttaacgttttttttttttttttttttttttttttttttttttttggtagcgatttggattttattatgttgtttaggttggttttaaatttttgggtttaagcgatttttttttttcggttttttaaaatgttgggattataggcgtgagttatttcgttttgttattattttattttttgaatgattttttattgttttaattttttaggtgattaataatgaggtttgttattattattttagtataatgatattatttttagtaagggagttgggcgtttttatcggtagatggcgttgtcgattttttaaaaagcgagtttttttgtttttttattttgagttcgttgagttaaaatatagttcgaatagtttaggagttttaaagtttcgtttatttttattttttaaatttttttttattaagattaataaaaattttatttttattattagttatgtgatttgttaagataatttataatattttttattatggaaatttttaaatttatataaaaataaagaaaatatttttatttatttattatgggattttaataattattagtatttataaattttggaataatgttatttttttatattatgttttattttattttttttaaagagttattagatgggaaatttatggtttaggtttaataaaattattttatattaggaaagttttggaaatagattgcgttttagtaggaaaaggaggggggttgatgattttatttaataaaatagttttaatttatcgtcgtgattaataatcgggtaatgtggaagtttttcgtaagatttttcgtggaaggtaaaaatagagtataattgggtttttgaatattttttatatttgtttgtttttgttttgtttattttttaatttgattttatttgttttttattaggattttagttttttagggtgtagttgattttagtttttttttttatagtgagattaagataagttgattgggtttggaaatatttttaagagaggttttagaatggagttaattgtatttttattgagttatgtttgaagataaattatagggtatttatttagtagtttaggttgatatttattttattttttgaatgtgggtttcgggtattttttagagtagttgtttgatattaggaagggaaatgtgtgttagagatggtttattgttataagttaaataaataaattattgaataaaatatgttttagtttttgttttgataaatatatttttatattgattttgaaggttagtgtagtagatattgttgtgtgttatttaaattttatttttaatattgttatttattttttagttgttaggggtgttggttgtgatagttttgtttttgggaattgtttttagttgaaaagagttgttttgtttaaggttatattttttttttttgggggtagttatatttaatgattgatagataagataagaatatataaagttttggttattttgttttaagtttggttatttttttgtttgtttgtttgtttgtttgtttgagatggattttcgtttttgttgttcgagttggagtgtaatggtataatttttgtttattgtaattttcgttttttgggtttaagtgattttttagttttagttttttgagtagttgggattataggcgtatgttattatgttcggttaattttttgtatttttagtagaaacggggttttattatgttaattaggttggttttgaattgttgattttagataatttttttttattcggttttttaaagtgttgggattataggcgtgagttatcgcgttcggtcgagtttggttaaatttaaaggatttttttagtgttagaggtttttataatttatgagattagtttagtattttttacggttttattatagtttaattgttttttttttttgtttcgttttttttagtttttaaaggtgtttgttttaagattgttttttaataaaatttttgtagataaatttatttgagaatttgttttttggggaatttaggttaggatagttaggttggaatttagaattttgagatttttttaggttttatggtagaatatggttgagtgaggaaaattagttttgggttttttatttgtatttgttttattttttttttttgaaaatttaagtttttaaaatttttagatttatatttttttttgaaaatagttatattttggggttttagagtatgtacgatagtagcgaggtataatttttgggacgatggttttaggaggaggtttatgtaaatttggaagtaggtttgggggttattagtgttaggaatttaggggttttaagtatttagattgtagtatttgtagaagagatgtaatttttatgggtaggtttatttttttggtttttcggattttttgttttataagttgggggaatgatagagtaggtttttttagattatggagttcgggtagggtttttatgtgtttggatttaagggtgggaaaatattttttatttaatttaaattagtggtatttgtgtttttgttataagtagttaaaaatttatattttaatacgtttagttgattttttgtatttttatgtttatttttttaaaagagaatagtgtatttttttaaaagggattttattttttatttttaggttttagaatatattgatgttttttatatgttaattatgttttttataattaaaatttgattttattaggaaatttatttatgtaagagatgtttttaattaaaaattatttaaataatttttttaataattaattatattggtttttttgtttttttttttgttgagggtttatatttttggatattttttgatatttattagttttgttttttatagtgataatttataggaatatttttatttattgtttttttagtgatttttagttttttgtaaataaaattttatttagtttttttaaagggtagttttttaaaaattatgagtttatattgttagttatgatatgcggaaagagattgttgagggttttaagtattaaatttatttattgtaatgtattgagaaaatatgtattaattgtttgttttgataatgtattgtagtatgtaagagtttattattggggaagttgcgtgaagagtgtataggatatttcggtattaattttgtaattttttgtgtatttttagttatttgaaaataaaaagagaagaaaaaaaaagaggaggaggtaggatattaaaaaatataattttatggatgggtttggtggtttacgtttgtaattttagtattttgggaggtcgaggtcggcggattacgtgagggtaggagttcgagattagtttagttattatggcgaaattttatttttattaaaagtataaaaattagttaggcgtggtggtaggcgtttgtaattttagttatttaggaggttgaggtaggagaattgtttgaattcgggaggcggaggttgtagtgagtagagattttgttattttatttcggtttgggtaaaagagtgaaattttgttttaaaaataaaataaaataaaataaaataataataaaaaattttttatttaaaaatcgaggttattttagataaaggaattttttttatatttatagttttggttttaaattttattgtggtttcgtattttagtgaattggattagtgagtatgtgtgattgtagtgattgtttaaaaaagagatagggtagtttgttttgttttatgagtttttttcgttgggtttttataaaaggggtgaagtgtttttttttagtaggaggcggtattgagtaatttttatgatattagttttaaagaaggatttatttggtttgtagtttgttatatatattttttttagggttttagtagggtttttgtagttggtaggtgtttaatggaggattttaggattttgtattttggttattttatttttgaggattcgatttatatttggtaagtttaggagatggaattgaggagggtatatgtatagagtattgggaattagagagttgagttattggagagtttcgaattttagagtagttgttttttttttggatttaggttaagattgagggagattgacgatatattgtattttataggtttttaggggtataaggttatttgcgattatagtagtttcgtttggttaaggaggttttgggtttttgagggataggaagaattagagtagagaagagtagatggaatggtgatcgacgtagggttttgaagtttatttagggttgttttttagaaatgtgaggtgttgtgtttataaaaaaagtatagtttgtattgtttttagttttaggtttttaggggaaagggttaaataaggataatttgtaatgtattggaaggaaaaattgagaggtttatatatttatgagaggtatttttattatgtatttgtaaattttttagaatgtaggaatgtttagatgttattaaaaaaaaaaagattaattgtatttatttatttatttatttttattgatattgtaattgtatatatttagatgttttttttttttttttgagatggaattttgttttttttgtttaggttggagtgtaatggtatgattttagtttattgtaattttcgttttttgagtttaagtaattttgttgttttagttttcggagtagttggggttgggattataggtatgtattattatgtttagttaatttttttgtattttagtatagacggagtttcgttatgttggttaggttggatttgaatttttgattttaagtgattttttcgttttggtttttcgaagtgttgggattataggattgagttatttcgtttagatttttttttttttttaaatggaattttttataaatttgtgtgttatttttgagtaggggttatgttaattttttttgtattagatgttatttttatttttagacggagttttattttgttatttaggtatttgttattatttttagttgatttttttgtatttttagtagagatagggttttattatgttggttaggttggttttaaatttttgattttaggtgatttatttattttggttttttaaaatgttgggattataggtgtgagttatcgtttttggtttttttgttttttaaatttagtatttattttagtattttaatatattattttttaaataagtttttatttaattatttaaaatttttattagatttatatagatatgtaattttaaaagttaaatatatatgtgtgtgtatataaattatagatatgtaatttaaaaagttaaagatagaataaaagttatagttcggtattaatttttaattttttttttttagaagtaaaagtatttcgatgtttaattagtttttatttttttgttttttaataataagttatattagttagggtttagtgtagtaattagagattacgttaggtaaattaataggaagatattttataaagggtattaagagtttttgaaatttttataagggttgagggtataggttttaagttgggttttatggaatgatatttagaattatatagatttattaggtttttttttgattatttgtttatgaatttattataaatttgttagtagattttatagaagtttattttttttttgtagtttaatgtattataattaattaatttttttttttttttggtaatatttttttgtaattaggtaaaggaatttttttaatttttgaggttttggttttaagtttttttttttttttttttttttttttgagatttattttgttatttaggtagaagtgtagtggtgaaattttggtttattgtaatttttgttttttgggtttaagaaattttttgttttcgttttttgagtagttggaattataggtatgtgttattatgtttagttaatttttttgtgtgtttttggtagagacggggttttattatgttggtcgggttggttttaaatttttagttttaggtgatttattcgttttggttttataaagtgttgggattataagtaggagttattatgttcggtttttaaattattttaatttggatttgcggatttttagtttttttatatagtaattttttgggatttttattttttttattttttggaggattttatatttttattttttttgatttaattttttattttgatggaattttttaaggaaaggggtaagggagggtaatttttgaaattttgtttgaaaatgttttttatattatgattatatttgattaatagttttattgaaaataaaattttaagttgtaaaatttatatttaaattaggaaagtattgttttattattttttagtttttagtgttattgttgaaaagtttttagttaggtgttatggtgcgtatttgtaatattagtattttgggaagttaaagtgggaggattgtttgagtttaggagtttaagattagtttgggtaacgtagtaagatttcgtttttataaaaaataaaattaaatttaaaaattagttgggtatggtggtacgtgtttgtagtttttagaaggttgagaggggacgattttttgagtttaggagtttaaggttgtagtgatttatgattgtattattacgttttagtttgggtgatagagtgagattttgttttaaaaaaaaaaaaaaaaaaaaaggaaaagagaaagaaaaaaagagaaaattttatattatttgagttttgattttttttatgtgatttgtttttttttttttgtttaattttgggatttttttttttgtttttagtatttttaaaattatggtagtatgttttggattttattttttttgttagatatttttgttagatatttgaggtttattttattttggaattatattttttagttttgagaaaagtttttgaattatttttttgataattttattttttttgttttttttgtttattttttttagaaatttttttatttatttagatgatttaatttttatatattttttatattatttatattttttttttttttttttttttttttgagatggagttatttaggttggagtgtagtggtattatttcggtttattttaatttttatttttttcgggtttaagcgatttttttgttttagttttttaagtagttgggattataggcgtatgttattacgtttggttaatttttgtatttttagtagagacggggttttattatgttggtaaggttggtttcgaatttttaattttaagtgatttatttattttcgtaatttaaagtgttgggattataggtttgagttattgtgttcggttttatttatatttttttattttttgtttttttttagaagatttttttaattttaaattttttatttaataatgtgtttttttattatggagaaaatatcgttttttatgtttatgaaaatattaattgtagtggattttattatttggttttttgtattttttaaattttttttttttttttttttttttttttttttttttttttttttgatagggtttttttgttgtggtttagggtaatggtttaattatagtttaatgaagtttcgatttttcggatttaagtgatttttttattttagttttttgagtagttgagattataggtgtacgttatcgcgttcggttaatttttgtattttttgtagatatagaatttcgttattttgtttaggttgtttttgaatttttgggtttaagcgattcgtttagtttggtttgcgaaggtattgagattataggcgtgagttatcgcgtttggttttatattttttaatttttgtgtttttaatatttgttttttatgttagtggtttttattttataatgattagttttttattaatgtattgttttttaatcgtaaatttatttttttaattgatttgtattgaattaagcggttttttttcgtagttagtataatattaagtttttttagtagagggcgtcggagggatattgttagaggaaagaattttttttatttttggtttcgggagttatggtttgtgatttttgttgtttttgcggtagggtttattagtggttaggtgggaatattcggtggtttttgttttagttgcgtgttgatagtatgcgtttttttagcgagttggttttgacgtggattttgtatgttttaggttttgtatgtagtgagtgggttttcgatgtcgcgatttttttagttttttgtttgtttatgattgtttataggttttggtttgggtattttagggaaataatttggtatttggtgggtatatgtatattttttgttttgagttttgaatttagttttggggtggggatgtttttacgtgtgtttttttttgggtattttttcgcggttttatagtattttttggagttttttgtacgtttttttagtttgttatagttaataattttttttaataataaattttttttgtttaaattggggtttgggttttgtgaatgatatagtaatttttggtttagttagattttaagttgtttggaaattttaggtgtgtgtgttggggatggggggaggttttagtgggttttattatagtgtaaatgggttgaattgtttttttagaagatttttgtattagggtttagttaggtgaaagaaaaaaatttaaatatttaaatagaggtaattttgttttattttattttatttgaaaaggaattttattttgttgtttaggttggagtgtagtggtataatttcggtttattgtaatttcggtttttcgggtttaaatgatttttttgttttagttttttaagtagtgggattataggtatttgttattatatttagttaagttttgtatttttagtagagatagggttttattatattggttaggttggttttaaatttttgattttaggtgatttatttgtttcggttttttaaagtgttgggattgtaagcgtgagttttcgcgtttagatagaggtaattttatataaaggattgttaattatatattgagatttaaaaagataaaaagagtattgagatatcgtagaggtagaacgcgtgggaattaggaatggggtaattgttttttttttagttttggggaattgagggaagaggttagtattatttaatgggagaatttgggaggatggttttacggagttagaatttagttttttaaggaggagtttggttagtgagtcggtattattgaggttacgggaagaggtttttgtcgggagtgaggaagaattatagtttgggatttgttattgttgttggattagttgttgttatagggttgaagattttcggttgtggtgatgtcggtaggattgggaggttaataagggaagggattttttttttttttagtgttgatatttttttttatatttaagagggagttagttgggaaggagagagtggaagagggttttgaagttaagtgatagtagtttaatattcgttagaatttttttatttttgtgtttttaggtgtttttttttgtttggttagtttttttagagaaggtttttttattaatcggtttggggtaagtttggttgttggagtttttagaattaattttatggaggggattaggaagttttattgttcgataggtaggtttttatataattttaaatgattttttttttttttttattgttttttttattttattttttttattattatttattttttattttttaaattattttattttgtttttttttggttatataaagttagaaggttataggttatatatatatatatgtaatttttttttttttggtagagttggggattttgttttgttgtttaggttggttttgaatttttggatttaagtgatttttttgttttggttttttaaagtgttaggattataagtatgagttattacgtttagttttaaatgatttttattgtggtttttaggatgtggtatggtttaacgtttttagcgagtaaattatttattagggtggaatatagggggttattttgttatgtgcgttgagttaggagatttagggttttagtggttttttatatagattattagtttttggttttaggttttttgtatatttacgtttgggatatttggtttttttattttttattggggttttgttatgtgaaattagtttgtttttgggatttttttattgatattttatttttaaattttttttatttgttaagatttttgtttatttgttatttagattattattttttatttatttagattgtgtagttagtttttttttttttttttttttttttttttttttttcgttttttgtttttgttagtttttgttttttaaaatttttttattatattttggtgggatttttgttgggagtagagatggttgtgtttaattagttatataaagtttgaaggttcggttaggtatagtggtttaggtttgtaattttagtattttgggaggttaaggtgggcggattatttgaggttaggagtttaagattagtttaattaatatggagaaatttcgtttatattaaaaaaaaaaaaataaaaaatttagttagtcgtagtggtgtatgtttgtaattttagttatttaggaaggttgaggtaggagaattatttgaatttaggaggcggaggttgtggtgagttaagattttgttattgtattttagtttgggaattaagagcgaaatttagatttaaaaaaaaaaaaaaaaagttcgaagttttagttgaatttgtggtgtagatgtggtgggtgggttttgggtatttagcgtagtttagttggtagtatgtagaagtgaatattaggaagtttttttttttatttttttttgttttttttggtttgtttttgtttaggtggtattggggtttttgttttagtgtatgttttaatgtatttttaataagatttttttttacggagacggagatgagatagtttagaaatttgattgatatgttatgttgtggagagatttttcgggaataagagggagtttgtagtttttattttatttttgttggtttttaatgattagaagtaaagtagagttaaaataaataggttaatttatattttttgttattaatgtttataaaatgttgtatttttatattgttgtttaaagtatagattgtagaaagagtattgaggtggttttgatagtaattttaagaattgtagagagatttttttgtttaataatttttttttttttttaaaaataaggttggatatggtggtttatatttgtaatattagtattttgggatatcgaggtgggaggataatttgagtttaggagtttaagattagtttgagtaatatagtaagatttttatttttataaaaaatataaaaattagttaggtgtggtggtttatatttgtagttttagttgtttgggaggttaaggtaggaggattattttagtttagggaagttgaggttgcgataagttatgattgtattattgtattttagtttggataatagaatgagattttgttttaaaaaaataaataaataaaaataaataaattaaataatattggttggatatggtggtttacgtttgtaattttagtattttgggaggtcgaggtaggagggtttgagtttaggagtttgtaattagtttggataacgtagtgagatttttatttttataaaaagcgaataaaattagttaggtatggtggcgtgtttttgtagttttagttatttagggagttgaggtgggaggattgtttgagtttgggaggttgaggttgtaatgagtcgagatcgtattattgttttttattttgggtaatagagcgagattttgttttaaaaaggaaaaaaaaattattaggtttgaaataaaatatatataatataagaaaataaaagtaatttttaattttaataaataaagatagaagatattgttaatattttggtatattttttttttttgttttttttttgttgttgtttttgttttattttatttagagatggtttttttttgttgtttaggttggggtgtagtggtataattagttgattgtgattttgaatttttgggtttaattgattttttgatttagttttttaagtagttaggattataggtatgtgttattatatttagttttttttttttttttgaaataagaatgggttatattttgttgtaataatatggggttagggattaggtttgcgtagttgtagttatgttttatgatatggttggtgatttagttaattgttggtttatgagttggagtaattttaaaatggttttttaaaggatgtttggttttggtgtttttatattggtttttgtggagtatttttaagtagaggttgtatggtgttttgtttaggtgggagtataggttgagtgatttagtttttatgaggcgatgtatatttgttgttcgtttaaatgagtttttaataaatggtaatgagattggttatcgtggtttacgattgtaattttagtattttgggaggttgaggttggcggattatttgaggttaggagttggagattaatttggtcgatatggtgaattttcgtttttattaaaaatataaaaaattagttgggcgtggcgggtgattggagttttagatgtttgagagtttgaggtaggagaattatttgaattcgggagtcggaggttgtagtgagtcgagatggcgttattgtattttagtttggataatagagtgagattttattttaaaaaaaaaaaaaagaaataaataaagtagatatatagtagttttttggtatatgagggggattggttttaagatttttgtgtatattaaaatttatatatatttaagttttatagttagttttttgggttttaaatatatgtaaagttgggtttttgtatatatgggttttatatgttattattattgtgtttgtgatttgtatttgattgaaaataatttatgtataagtggatttaagtggatttatgtagtttaaatttatgttgtttaagggttaattatatggatattaaattaagtaagatataaattgggatgttaaagtatgagtaataaattaaaatttaaagaaatgatagaaattattagagaaaattaaatgaagtattgttaaaaaattttaggtaattttaataaaataggaaaaattttattaagttgatttttgtaaagaaattggaatatgagttttttttatttacgtgtttgtgttttttagaagggcggttttgaggagttagtatatagtttaggattgacgttaatgtttttaggtaggtttttattgttttttttgcgtttgtttttttttattttttagaattttagttttaaaattttgtttgatgtttagtaaaggaagatatatttagatatgtataataatggtagaagatagaggtgaggaatgttgtgaaaggtgtttaaggggttatggagagttttgggattttggggttattttaaggaggttgtgttttaaaatgtgtttatataggttttttttattataagtatatttttattattttatgtattttggaaaatatagaaaagtattttaaaagtaaattttaaagtagtaagttttagattattgtgaaagttaatttttaaaaatatttattaaatttaatgaattaattaattttttgaggtatggttttattttgttattcgggttggagtgtagtggtataattacggtttattgtagttttaattttttaggtttaagagatttttttattttagtttttcgagtagttgggattataggtattcgttattatgtttagttaattttttttcgttgttttttgtagggatagagttttattatattttttaggttggttttgaatttttgggtttaagtaatttatttatttaaattttttaaagtgttgagattatagggatgagttgttgtgtttagttaaaggttaattttatgtgttagtatgtttaagttatggtatttaaatatttggttaaatattattttagatgtttttattaaggtattttgtagatgaaattaatatttaaatggatggattttgaataaagtaaattattttttcgtatgtgagtgggtttgatattttttaaggaagagggaattttgtttttaggttgtttttaggtttgaattgtgatattaatttttgtttttaagtttgttagttttttttgtaaattttggatttgttaatttttataatcgtgtgagttaattttttaaaattttttttttatttatatgagtttttttgagtgtgtttttttatttatatgagagagagagagagatagagagagagaggttttagttttgtttttttggagaattttaatatagttatggttttattttaaaatatttttttttagttttttttttatatttaggtggttgttgttgtttaggtttttgtttttgttttttttgaggggttgtattttattgttattaattgtatatataattgtgtgttttttaattttttatatttatttatttatttatttttgagatagtttagttttgttatttaggatggagtaaagtggcgtgatttttgtttattgtaatttttgtttgtcgggtttaagagattttcgtgttttagttttttaagtagttggaattataggtatttattaattacgtttggttaatttttgtatttttagtagagatggggttttgttatgattttaagtgattcgttagtttcggttttttaaagtgttgggattatagtatgagttattgtgtttggtttttaattttttttaaataaattattatgatattattgttttttttgttaatataagttttaataaaagttatttaagtggttttttaatgatgtataaagtatatagtttataatttatagtttttattgttaaatgtttttgttgtttttaatattttgttaagatagtaaattgtaatgtattttttttgtttataaagttttttatataattgagaattggatagatttttagaaatgagatgattgtattgaagttataggttaagagatataaagagaatagtagcgattcgtagtaagttgggttagaggttttagagattgttgtcgaggtttgttggggaggaagttatggttagtgggggggttacgagtgggtatagaatttatttttagtttttatagttgtttttagttttatgtttaattaggttttattaaagatttagggataatagaagagaattttaggtatatttaaaattggaaatgagatatggtgtttttagattttagaggtttacgtttttttttgtatgtatttgttataggaggtttttttgttttatttttagtacgttttgagttttgggggttagtataattttttaagataggtggtttttttgagtgtgtttttattatgtaaaatataggtttttaattttgtttttgttttggtttaaagatagtaggaagtttttttatttaatttagtttgcggtttatttatttattagtatttgtgttttttaggatgatttaaagtgagaatgagttattttttggaggagaaatattttaatttatggtttgtgattttagtgttttatgatttgtgagagagattatatgtttagtagaaatatatatgtatttttttgtgagagagattatatgtttatagaaagcgagtttcgtgtaatttataaagttttagtagttatattaaaaaggtaaaaaataataggtgaaattaattttaatagtaaattttatttaatatagtatatttaaaatattgtgattttgataagtaataaatataaaaattattagtgagatattttattgtttttgtattaagtttttgaaattttatgtgtgttttgtatttaagagtatatttgtatttggattagttatattttatgtgtttagttgttatatgtggttaatggttattatgtaggatagtatagatttattgtatagtttatttgaggagattttagtaataaatatttgttttgtatcgtatgtgttttaagaataagttattattattaattagttttttttttttgagatggagttttgtttttgtagtttaggttggagtgtagtggtatgattttggtttattgtaatttttgtttcgtgggtttaagtgatttttttgttttagtttttcgagtggttgagattataggtgtatattattacgtttggttaatttttgtatttttaatagagatggggttttattattttggttaggttgattttaaatttttgttttcgggtgatttgtttttcgttcgttttttcggttttttaaagtgttgggattataggcgtgagttattgtgtttagttaagaatacgttatttagttttgaattatagattttattgaatatttatagattagtttatgacgtttttaatttgtttagtggagttagttttttttattttaagatgaaaatatggatagtattaagattgttttgattttttttaggttttgtagttattttatattattaaatataatgttaatttagaaatttaacgtttagttttaaaggtaagtttttttttttttagtaagggttttgtaaggatgggaagatgagaaatggggaaataggtttttaatattatgtatttatttttttttttttgttttgttaatggtggtttttaattttttaaggttgagtagaatggggaagggttgggggaaggagtggtttggggcgtggagtaggtacggtttgtaagagggttttgtattttttgggattggtaggggtttataggggattttttttttttgggtgtttttttcgagattttttatttttaatgttatatagttgtaaatgaggatttttttttacgatttattttttttatagtttataggaatgtagtaattattttagtttttttttgttgaggtttgttgatgtttgtaggtggttatattagataggattagttcggttttatattagttcgttttttagtatgttttatattagtttgttggaaatatttatatagttttgttttgaaaatttgggatataggtttttagtgttttttttttttttatatttttatttttagggtagaaaattagtttgttttttattatgaggtttgtagataaatgttagatgttagtttattgtagtttgtttattggggagggggaagttttatgtaggataataggaaaaaagagtgaaattattttgaattagatgtttatatatataaaatgatattgtttgatatttgaagggaataagaaaaattttggagtttttttgatttagtgatatgaaagaaagatgaggtttatgtgttgtggtttatgtttataattttagtattttgggaggttgaggttggaagatattttgagtttaggagtttaaggttagtttgggtaatatggtgagatttaatttttattgaaaaaataaaaataaaacgtagtagggtatggtggtgtatgtttatgattttagttatttgggaagttgaggtgagaagattatttgagttagtgagattaaggtttttatgagttatgattatgttattgtattttagtaaattaaaaaaatttaaaattttttttaggtttgatttgaaatttagagattttgaaaaagaaagaaaaagaagaagaaagaaagaaagaaagaaagaaaaaaagaaagaaagaaaagatgggattattggtcgttatggatattgtttttatagttattttgttattttgattgttattgcgtattgtttgaaagattttgttatgagaaaaatataattattttttaatttaatcgtgatagattataagtagataaaataaggttgagatagattaaataaattattaaggggaagaattagattagaatttaggttttttggttttttatttggtgtttgtttttattttgaaatttatttagggttacggatttattgatttatagatttagtgtgataaagataattagaaattaagttattgtaataaaagttttttaaagataggatattagtttattgttgtatttttagtgttgacgttagtgtgtttgtttaataatttatatttaataaatgtgagtagaatgagtgaattaattaattaatggtttagttgtttagtttgtgagggaataagtatttgaaaatgttaaatgaattattgaaagttatttatatatatgtgtgtgtgtatatatatatatatatatatatatattttttaaatatagagttttgttatgttattcgagttggtttttaatttttgagtttaagtaaattattcgtttcggttttttaaagtgttgggattataggtgtgagttattttattttgtaatataatataaatgtcgaaagttatttatattttataggttgtaagatatatatttatttttttatttattattttttgaatagggatgcgttttataattaatggcgtgttatagtttaattcgttgtgttttttttttagtgttgtatgaaataatggtatgtttttcggtaacggagttttagatgtaatgaggagtagtagttgtttgtggatatacgttgtgttttatgttagtgagtgtaaggaaagggggaggtgggggtgatttcgtgggatgtaaaataagttaatttttttaggtttttagaagtggcgtttaatttttagagaggcgtttatttcgtagagggttattattcggttattgttattagggggttattagatattttattaggaagatataggtagtttttgggtttttttttcgattaggttatttgttgttatggatattgtttttatagttgttttgattgttattgtattttttttgattatttgtttttgtatgttgaatatatattataatttaatttttatttttattaatttaataattttattatatttagattttttaaatggttagtttttattaattgtgacgtttatggtatttgattttgttagtgagttttgtttttgtagtttttgtgttttagtatataatattgtattatattttagtttattttataaattgggtatttattgtaagtaattaagtataagtagtgaatattaatttaaatgaaagaatgggtttgttgtggtgttagcgtaagagaaaatttttttgttttatggtgtattagtagtagtttattttgtttgttgttttatttgattatattgttggtggtaaatattattgttgaaagttttatgaattttttaaaggtttttaaagaagatgtggaatattgaagtattttataacgtttgtatgtatatgatagtaatatttattcgtttttgttaggtattttgaaggtaaaagttatttatatggttttttattgtgtttttatagttatgtataggtttatatgttttttgtaaagatgtgatagatgattaaaggaaatatttagtttttttttttttttttttttttttttttttttttttttatttttttttttttttttttttttttttttttttttttttttttttttttttttttttttttttttttttttttttttttttttttttttttttttttttttttttttttttttttttacggtttttttttttttttttttttttttttttttacggttttttttttttttttttttttttttttttttttttcgcggtttttttttttttttttttttttttacggtttttttttttttttttttattgtttttttttttttttttttttttttttttttttacggtttttttttgatgtcgagtcgaagttggattgtattgttattattttagtttattgtaatttttttgtttgatttttttgttttagtttgtttagtgtttaggattgtaggcgcgcgtcgttacgtttgattggtttttttatttttttggtggagacggggtttcgttgtgttggtcgggttggtttttagtttttaatcgcgagtgatttgttagtttcggtttttcgaggtgttgggattgtagacggagttttaattatttagtgtttaatgttgtttaggttggagtgtagtggcgtgatttcggttggttataatttttattttttagttgtttgttttggttttttaaagtgtcgagattgtagtttttgttcggttgttatttcgtttgggaagtgaggagcgtttttgtttggtcgtttattgtttgggatgtgaggagtttttttgtttggtcgtttagtttgggaagtgaggagcgttttttttcggtcgttattttatttaggaagtgaggagtatttttgtcgggtcgtttatcgtttgagatgtggggagcgtttttgtttcgtcgttacgtttgggatgtgaggagcgtttttgtttagtcgcgatttcgtttgggaggtgaggagcgtttttgttcggtcgtttcgtttgagaagtgaagagttttttcgttcggtagtcgtttcgtttgggaagtgaggagtattttcgttcggtagtcgtttcgttagggagggaggtgggggggtagttttcgttcggttagtcgttttgttcgggaggtgaggggtattttcgttcggtagtttcgattgggaagtgaggagtttttttgttcggtagttatttcgtttgggaggtgaatttaatagtttattgagaatcggttatgatgacgatggcggttttgtcgaatagaaagggggaaatgtggggaaaagatagagaaattagattgttgttgtgtttgtgtagagggaagtagataggggagattttattttgttttgtattaagaaaaatttttttgttttgggatgttgttaatttataattttatttttaatttcgtgttttttgaaatatgtgttgtgtttatttagggttaaatggattaagggcggtgtattatgtgttttgttaaatagatgtttgaaggtagtatgttcgttaagagttattattattttttaattttaagtatttagggatataaatattgcggaaggtcgcggggttttttgtttaggaaaattagagatttttgtttatttgtttatttgttgattttttttttattattgttttatgattttgttaaattttttttttcgagaaatatttaagaatgattaataaatattaaaaaaaaaaaaaaagaaaaagaaaaaggaaatatttatgttatttttttttatgggtagaaggtagaagttgaaaaagttttttgggtatggaaatttacgaatatttcgaggttaatttggtttagggttgttgtttaaaaaattttgggtgaggttttgagttgaaaataaaatatttttgtttgtgtttaatttttaaatttttttgagggtgaggtttgagaagtcgtaaatattttaaaaagtagaatttattagtaaaggtaaataaatgttataaatgttataattgatgatacgttttttattatttattatatatataagaatgttttttttgtgtatttacgatttgtttttagattgggggttttttaagaatagggattgtgtttggttttttttgtttggtttaaaatttaatatagattggaggaaagattcgagagtttgttattgtaagtttaaagaagagaagattgaaggataaaagtgtttatatttgtgagtgatttttgtagagatagtgtagaatagtttattatttgagatttagtttaaatgagataaaaagtgagtaattttggagttaggaaatttgagtttaatttttttattttttatttttttttgttatttatcgttaaggaggtttggggataatttatttaatttttttgaattttagtttttgtatttttaagataggatggtttttttattttatagaggtgatgtgaagattaaaagaatttatatatgtgatagtagtttaaagtgttttataaatatgttataagttttcggttagttattttattttttgggaagttttttaggatttgtataggttgaatgagattttttttttggattttgttcgaaagtatttttttattgtagtatttagtatgttgtattgtaattgttggtttttttgtttttgagggtaagaattatgttatttatttttgttggttggttgtttttgtttttaaaagaatttttagtattatattagatagttattaaaggaattttaggttaggtgtagtggtttatatttgtaattttagtattttgggaggttaaggtgggtggattataaggttaggagttcgagattagtttggttattatagtgaaattttgtttttattaaaaatataaaaattagtcgggtgtggtggtacgcgtttatagttttagttatttaggaggttgaggtaggagaattgtttgagtttgggaggcggaggttgtagtgagttgagattatattattgtaatttagtttgggtgatagagtgagattttgttttaaaaaaaaaaaaaaaggaattttaatttttttgtgtttataaataagattaaaatagaagaaatagtattaaaagaaagtatatatttattcgtttattttaaaatgtgtattttattttatttaagatgacgttgaatgtaagatgtagtattatttatgttttattaaggaagaaagagtgttattgattggtttatgatgtgttattaagtgtaagatatttttttatttttaaacgttttttggtttttttttttaggtagtgttttgcgatgttgtttaggtaggtttttaatttttagttttgggtaatttttttattttgttttttaaaagttttgggattataggtttgaattattgtagttagtggatatttttattttatttttattattatttttttaagatagtattttattttgttatttaggttggagtgtagtggtgtaatttcggtttattgtaatttttattttttaggtttaagtgatttttttgttttagttttttgagtagttgggattataggtgtgtgttattagcgtttagttaatttttgtatttttagtagagacggggttttattatgttggttaggttggtttttaatttttgacgttaagtgatttatttgttttagttttttaaagtgttgggtttataggtgtgagttattacgtttattcgatattttaattttagattacgatttaatggggaagatgtgtattagaggtttaatgaagtatatgattattaaatatttaatttattttatatattgtttttaaaatttttatttttaaggaattgatattttagtggaaggagatagatataaaataaataagttaatacgtaaataagtataagtttagattgtcgttagttttataaagaaaataaatatggtaatttgtagagattgaagagaggggtttgttttagatgaattataagaaaggttttgaatagatttgaaaaataattacgtgttttttaaggtgttaaataatatttcgttaagggagagtgttgaattattgttgttttattaaatatttttgtttagaaagataggggattggattagagtgtgtattcgtagacgttttaatgagaggtgatattttttaaaaggtataaattttgtttaggtataatttagaggggtgtgtttatttgtttggtgtttttaatttggatttgtgtaagttgggtttagttggatttggtatgattttttgatgatatttgaagaggttttttaaatattggattttataaagagaaaaggaggattagttgtatgattaattgtatgtatttattaaaggtatggaatgtatagatatgtgcgataatttataagtgttatttgagtatgagtatattatggtttgagagttaattattaaattttgtagtttaggttttaggagtggttagaaaggtattttttttatttattgaggttttattttttttttttttttttatgggtgttttgtagtattttttttttgttttttttatttttaatattttttagagattagatttttatgtatatttttttgggtttttaaatgttaaaattatatttttttttacggtagtattttgagggggtggatttattttggagaaagttacgtggtaagttgaaggagattgattgggtaaagtttttgtgtttttggtagaattgttgttataaagggatatgcgtattttgggaataattagtataggttagttgttattgattttaaggatgttttttatgttttaattttatgtataattttgggatttttggagagtagtaaaaagattgagattgaatttttttttaatttgataggagtagaaattaatatttttttttttttattttttttttcgagataaggtttttttttgttgtttaagatggagggtagtgatatgattatagtttattgttgtttcgattttttgggtttaagtaatttttttattttagttttttaagtagttgggattataggtatatattattatatttagttaatttttaatttttttgtagagacgaggttttattatgttgtttaggttggttttgaattttaggttttaagtaatttttttgttttagttttttaaagtgttgggattataagcgtgagttattgtgtttagttttttttttttttttttttttttttttttttttttttgagataggattttgttttgtcgttcgggttggagtatagtggtatagttatggtttattgtagtttttattttttgggtttaagcgagttttttgttttagttttttaagtatttgagtttataggtatgtgttattatattcggttaattttttttttatttttagtagagataaggttttattatgttgtttaggttggtgtagattttttgagtttaagtgatttttttatttcggtttgttaaagtgttgcgattataggtgtgttattttgtttggttagaaattaatttgattgaaagaaaagaaaagtttttgatatgttagcgtttttgtatgtatgtttttgtatgttaaagtttttatgttatttatagagattttatggtttttttaattgttttaagttgtttttgaggtgtagaaatttaagtatatagattttttagttagaatttgtagttttagtaatttttttgtttattgtataaatttagtttgtatcgagattaaaagttttgtttttttgaagattaaggtagattttggaattttttgtgtttgttaatattttttgataaatgtttagttttaaattttagtttgaattttaggaggaagattttatagaaatatattggattttttttgtttgtatattaattaagagatttttttgttattttttttttttgtaataaattgatatttatgtaagtatttttaattataaaatttttttttggttatttgttgtttttatgggggtagaagagggagattattttattatttttttattttttattatgtgtagtttttatatttttaaaattttgagtattgtgtttttttaaatgtgttatggagatattcgtagaagtttgtatgttttagatgatgtttatgtgttatattatttaggattttatttagttggaattataagaagtttattttattgagtttcggtatattgtttattttatatacgaaatgttcgagaggagtagtttagggtttagtattgttatcgggtatttaagtgattttttttttttgttttatttttagtttgaagtttttattttgttgtgggtttttttttgattttagtattgttgagttttaggttttatatttgtattttaggtaggaagaggaacgaaggggaaggggtaaagggttttttttttatgagttttggtttttttatttggaagggatattatttttaggaatttatgtttttattatattggttagagttgtatttttttattgtattggttgtaagggggatcgggaaattggggatttgggaaatggttttttttagttgggtatattattattatttttaaaatttaggttttttaagtgtaagggaaggggagattagagttgtttttgttacgtttttttttaggtaataattttgaaaatttttataatataagtattttttggattttattgatgattaatataaaattaatataaagttaatagaaatgattagtttttataattgtatagtttaataagagtagaacgagaattgttttaaaatttaaacggtgtatttgtattaagggtttaataatttcgtagttgattgagagattgaaggttttgagagagtttgtatagagacgatttatgaaagaaggaaaatattaagtggtaaatgagatttgagaaattaggttgtagtaattattataatattaatgttggagcgaagaattttttagtaaagaaatattatgtattatattaaattattgttgttatttttaacgttattggaatagtagagttataagtataaggagtttatattttattttttgttttatatatatttacgtttaagttaatatggcgagtttttaaaaaattttttttttagttaggtacggtggtttatattgtaattttagtattttgggaggttaaggcgggtggattatttgaggttaggagtttaagattagtttgggtaatatggtgaaattttatttttattaaaaatataaaaattagttaggtatggtggtgtacgtttgtaattttagttattcggaggttgaggaaggagaatcgtttgaatttaggaagtggaggttgtagtgagttaagatcgtattattggattttaatttgggtaatagaatgagattttgttttaaaaatatatatgtatttttttttttaaaggtgtttattatataagtttgagaaatattggtttaatatttatttaattaatttaatttttttattttagtattttaatttattatttcgtgttttcgattttgtattataatattataattttattatttaatattggtggtgatgttgtttatagtggtattagtagtgagtaaataataattaattgtttttatatatttttgattttttggtttttgttttgagttttttatagagttgttatatttaatgtttcggttttgtttgtggttttagttattatttataggtgtatgaatatggtgtatttgtattaagtaaggataaatttttttttttattaggtagggttttttttttagaggttaggtttggatttcgtgtttttattttatatcgcgattgattaagatgagatttatttatttgttacggtggttagttttatataggtgtttatatatatttgttgaatgattagttgattatattttgtaaatgtgattttttggtttgggtggtaggagaacgcgggtatagtttttttaagagataagttgtattttttagtttataggtagattgagatagatagattgggagacgtagagtgttgagtttatgttaggtattgaataaatattttgttaaggttaggtgcggtggtttatgtttgtaattttagtattttgggaggttaaggcgggtggattatttgaggttaagagttcgggattagtttggttaatatggtgaaatttttgtttttattataaatataaaaattagttaggcgtggtggtatgcgtttgtaattttagttattagggaggttgaggtaggagaattatttgaatttggggggtagaggttgtagtgagttgagatcgcgttattttattttagtcggggtaaaagagtaaaatttcgttttaaaaaaaatattttttttttttttggttaaatgaatgaatgtagagatatgttttagataaaaatagataaaatttgttttattgatttgattagatttatcgaatattttttatatttgagttgtgtgtaattttttaaaatttggtagataggtaaaggcgattgtttagaggaagtaattaaggttaggtagaattaggagatatttagagtagatgggtatttttttgagtgttttttatatgtttattttaggggttagttgttttttttatgtggtggttttagggttttagattagggcggaggagtggaggtttgaggatatatattatgttgtatagttttgtagaggcggatgaggggttttttttttttagaattaattgtagttattgttggggttttttttatggtgtattgtagtttatgatatggggatgataaataattttggtggatggatttaatggaggtaggaaatattttttttagggaggaagaaaatggtttggttttaatattttgttttttttttaattttggtggtttgtaatttattatttttgtttagtttgtttttttggttttgggagtttgttagatgttattgttttttttagattttgatattgattattagagattaatatttgttaaaaatgtggacgatatttagggggaaaaaaaagttttttgtttttttttttttttagatggagtttcgttttgttgtttacgttggagtgtaatggtacgattttagtttattgtaatttttgtttttcgggtttaagtaattttttgttttagttttttaagtagttgggattataggtgtttattattatggttggttaatttttttgtagttttagtagagatggggttttattatattggttaggttggttttaaagttttgatttcgtgatttatttatttcggttttttaaagtgttgggattataggcgtgagtatcgtattttgttaaaaaaaatttaaattttttttgttttttttaaaataatttaaaaaaaatttaaattattaaagtttaaagaaaaaagtattttgataaatgaaatttgggaggaatggtaatatagtttttatttttaaaatttttcgagttaaaggtttaaaagttaaaaatttagtaagtttgggagtatagattttttttttattttttatattttgagttttttgagttattttttgtttttagtttttatatgaaattaagaaggtgttaatgttagtgatttttttgggttaatgtttggtttggaggaaggaaagtattttttgttttagagtaagagtgtttaattttttatggtgatttatatgattagaaatttaattgtttatggtaatagcgaagtttagaaggttttttttttattggtgaatattgaatatgatttatgtatgagttaggtatatatggacgtttttattttattttttttttgttagtattttttagaatgttttagttttatggtgttattttagtagaattaaatgtgaatattttatttgtattatgtattattttcggttttatttatatttataaattgatttaaagttgtggatttgtattttggagtaggggttagtgtataatggtattaatgatcgtaagaattaacgaggttttaatgatttgttcgagttggttaattttgtaagtcgttatttgttaaaatttcgatatgtatttaattcgtaggttaggatggttaaaaaggattagttttttttttttaagtagtaggttagaagtaggaggtttgggttttagattaaatgttagcgagaggaagttataatgtggggttttttagattatttttttttttttttgattagattgattaaaaattatagattgttttgatcgttttgtgatttagttagttgtaggttttttttagtaggtttgaacgtaaattagggttttgaatatttttaggtattaataaaggtatttaggttgttgtttaaaacgttgaaagaaattggttttagttttgagttaaattttttaaatttttatataaattttatattttgatttttttgttatagatatgtttaggtagaatattttttttttttttttgtcggtagggaggattgttgtagttttttgtaagtttttttaataaatgttttgaattgattattttgatatttgggtttttttttttggaattttaattggttttatttttggagggtttgggttattttttgtgggaatttttttgttgttgtttttgggatgattttagttgggagtttggtgagatgaaatatgtagggttggtatggaatttttttgtttttttttgtagaaataatagggatttttagagatagaaaaatatttagagtttttttttgagagttggtataaattgtttttttggtgtagggtagtggtggtttataaaaatttatttaattttggttttaaaaaaattttttttagaattttagagtaggtagtaattaatataagaatatgtaatttttgatatgagtggattatttagaatgtttttaatttatttatttttttggtttttagttttttgtttttttaggaaaatttttttttttatatttatttgtatttaacggtttatgttttgttttgattttcgttgtgttttattatgtttgtgtttttatgttttttatttttagtttttttttttttttttttttttttgttttttatagttttttttgtttttaatgttttttgtattttttgtgttaggtgttttttttttttttttttatttttgtttttttaggagtttttgtagagttttttttatgtaggtttttttacgtttgacgattttttgggtttttgtattttagttttttatgtttatcgtttatttttagttggtttcgtttttttgatgttttgaatatttttagattaaatatttattataatgaagtttaatttaataaagagtataatagtgattgtggttgtagttagggatatgaggataatttttatgggtgttaggagtttggtgggttttattgttgtgattgaagtagtttatagaaggtgagtgttattatgtttagtggttttattttttgtggtttttgggtttgtagtgacggagttttcggtggtttttgggtttgtagtgatggagtgtttggtggtttttgggtttgtagtgatagagtttttagtggtttttgggtttatagtgatggagtgtttggtggtttttgggtttgtagtgacggagttttttgtggtttttgggtttgtagtgatggagtttttggtggtttttgggtttgtagtgataaagtttttagtgagtggtttttgggtttgtagtgatagaatttttggtggtttttgggtttgtagatatatagtttttggtggtcgttgggtttgtagtgatagagttttcggtggtttttgggtttatagttatattgtttttagtggtttttgggtttgtagtgatagagttttcggtggtttttgggtttgtagtgatgtggtttttagtggtttttttatttgtagttatattatttttttttatttttgagtttttagggttggtttttgggtgtttagtggaaatgttttggtttagttttattaaaaagtaattttatttaatgtgaattgttgatggtttatttttatttgttttgtttagtatttttataattatttttatatttaaatgatatttttttttaggtaatgtggtgagatttattttagttagggattatttggtatttttggtttaattttggtaaaatatattttataagaatttttttgtattataatatggattatttttgttgagttacgtttttcgaaggtttgtttatttagttttgattttgttttttttaggtttggttttttttcgtgggatattaaatttgatttttttttaagtttatttttttttgaattggtgttttagtaattggggtattttggttttatgtttataggtgtttttttttatttatttgtgtttgcggttttggtaaattaatgaggtagaagttgtgatttatgttagagattatatttaggttatgtttggtatatgatttaaaatgagatagttggttaggtgttttattttaaaaaaggaaaaaaaaagtatgagatagtttttgggttagatttggggttaacgtggtaggtttggaggtagggaagatttaaggtggtatgggggtaggtttaggggaggagttatgaggggtgtgggtgtgatttagttggattgagggtaatattgagttaggtataagtataaagaagagatgagtttttttcgtttttagtttttattgttttaggtagtcgttaggatttgggagtatttttatttttaggaatatatgtagtttatatggtataaattttgaatttttggtattttgtttaaatttagttatttttttttattgttgacgttttatatttttttaatagggtttaagttttttttttttttttttttttttttttttttttttttttttttttttttttttttttttttgagacggagtttttttttgttatttaggttggaatgtaatagcgcgatttttatttattgtaatttttattttttaggtttaagcgatttttttgttttagttttttaagtatttgggattataggcgtgcgttattagatttagttaatttttgtatttttattagagattgggttttattatgttggttaggttggttttaaatatttgattttagatgatttattcgttttagttttttaaagtgttaagattataggtatgagttattgtatttgatcgtttttttttttttttttttttttttttttttttttttgatatagggttttgttttgtgatttaggttagagtttagtagtataattatggtttaatgtagttttggttttttggttttaagtgatttttttattttagtttttcgagtagattagattataggtatgggttattacgtttggttgatttttttggtttttgtagagatggtgttttattatgtcgtttaggtttgttttaaatttttgggtttaagggattttatttttttttatttttttaaagcgttgggattagaggagtgttaaattttttatttttttaggaaagttgaaataaagaaatttaaataaaatgtataaaattaaaagtagagtatttttttaaaaggggatatgagaaagacgttggggtttttgtttttttgtggtaggtgattgagggtagataatagggttcggagtttttaaggtttatttatttatttcgtattttcgttcgggattggttttgtttgagttttaagaggttttttttttagggattttgattttatttttttaggtttcggggatttttgtattttttttattaaaattaatttttttatttcgttttgaatattttaggagaagtaggagtagtagaagggggacgtagcggggtattttttttttattttaagagaatttatatggtgttagttaggatattttttttttttttttttttttaaattttttttattttgtttttttttttttattcgtagtggttgtgggtttatatgtgttttgtcgagggaagttagagtttcgggtttttttttttggagggaggagtagttttttaattattttttgttatttaaaggagtggtcgggtagggtagaagaggttgttatgaggggaaggggggtttttagttttggattagagtttagagtcgagtagttataggggattaagtttgttagcgtgagtgtattgttttttgatgtggagtttagttgaaaattattttttattcggtgttttagtgtttagggagggtttcggtttttttttttataggtggttatagtaaagttaggatgattaaggagggtataggttaggtttgtttgggggatgatgtttggtaggaggagagttgggtgttagagggtagaggatatttggtaaggattaagagaaggttttttaatagaaggagaggaatatttatgagggggttaaaatatttaatttttttgttttttaaaattttattttttgtttaattatttatttaaatttttttttttggtttttttttagtttacggatttttttttttgttttttttgttcgagtgtttttattttagtgagtttttttaattattgtatgtattagtttgtttttacgttgttgataaagatatatttaagattgggaagaaaaagaagtttaattggatttatagttttatatggttggggaggttttagaattacggagggagataaaaggtattttttatatagtggcggtaagagaaaatgagaaagaagtaaaagcggaaatttttgataaatttattaaattttatgagatttatttatagttatgagaatagtaagagaaagatgattggcgaaaagagaaaaattttttatagtatgaggggaattgtgggagttataatttaagttgagatttttgtggggatagagttaagttatattattgtataaaattagtttatttgtggtgaggttaggtttgaatgagaatatttatatttttttttttttttttgatttttatttttgttttgtttattttttagaagattattgttggtttttatttttatttagagatgttttttattatttgtggggttttttttttttttagtgtttttttaattaaaagaggagtgtgaaattgtaggtgggtcgggaattgttttttttttagaaggtagttgattttttgaaaattaatttaatgaatggttagtttattatatgtaattgattatgttaattattagtattatttgaatgtattaaatattttttttttttttttttttttttttttttttttttttttttttttttttttttttttttttttttttttttttttttttttttttttttttttttttttttttttttttttttttgatagggttttgttgtattgtttaggttggagtgtagtggtgttattacggtttattgtagtttcgattttttaggtttaagtgatttttttattttagttttcggagtagttgggattatatgtatgtattattatgtttagttgattgtttttttatttttagtagagataaggttttattatgttgtttaggttggtttcgaatttttgagtttaagagatttttttttattagttttttaaagtgttgggattataggtgtgagttatattatttagtaatatttttaaatatagtatttaaatatatttaaaagaatttgtatgtatttagtataattaatgaatagattttaaaagagtatagtaaggaaaatatttgattttttaagttaagaggtataatttgtatatgataaaatttatttttttttatgtataggttaatagaatttttttggtttggttttgttttagaatttttaaaattttattttgagataattttagatttatagagaattataaaaataattaatagagttttcgtatattttttttttagtttttttttatgttaatattttatatagtataattatagaaattgagagattatatatataattatagaagttaagaagttattgttggtataatattatatatatttttttgagatagagttttatttttgttgtttaggttggagtgtaatggtacgattttagtttatagtaattttttttttttaggtttaagtaatttttttgttttagtttttcgagtattcgggattataggtgtgtaattttaatggtgatagattagattttttttatatttattaattgaaatttttttgtaagaaaaagtcgtgttttttttttattttatttatttaattatttgtttatattagaatggatttataaatgtttattttgttttgtgagttatgatttaatattattattatttattttgttgtttaaattttggttattgggagtttttttagatgggttttagtgtcgttttaatgttttttattttttttttgttttgttttatttatgagataagattttattgcgttttttaggttgaattgtagtggtattattatatagttttaaatttttgggtttaagggatttttttgttttagttttttataagtagttaggattataggtatgtattagtatatttagttgatatttttattgttattttgttttgttttttgagatagggttttattttgttgtttatgttagagtgtagtggtgtaatattggtttattgtaattttcgtattttgagtttaattaatttttttattatagttttttaagtagttgggataataggtgtgcgttattatatttagttaattttttttttttttgtagagataaagttttgttatattgtttaggttggttttaaatttttgggtttaagtaatttatttgttttggttttttaaagtgttgggattataggtttaagttattgtgtttagtttttttattcgtggtattttgtttttttgttttttttgtgtgagatggaatttcgttttcgttgtttagattggagcgtaatggtgtaatttcggtttattgtaatttttgttttttgggtttaagtgatttttttgttttagttttttaagtagttgggattataggtatgtattattatgtttaattaattttgtattattttagtagggagagttttttttaagttggttaggttggtttttaatttacgaattttaggtgatttttaggtttgggttttttaaagtgttgggattataggtatgagatattgtgtatggttttttttatttttttttaaaatatttttttgtattttggtattataagatgttttatgtttattttttattttgtttatttaggttttggaattaattatttttttatagagttttggtttttttttgtattagagaataatatttagaaattaagatttgggtattaggtgtgtttatttatagtgggtgttattgttttttgtttttacggaagttagagttaggaaacgtatgtatgtaaattaatttatgtataaatataggtttgtatttatttttgtaattatttgtttgtatatatagattgaattttttatttgaaatgtttgagatcgtaagtgttttggatttttaattttttggatttcgaaatatttgtatatatataatgagatattttgtggatgagatttaagtttaaatatgaaatttgtttatgttttatatatattttatatatgtagtttgaaggtaattttacgtgatattttaaataattttgtgtatgaaataaagtttgtgtatgttgatttgtggtgttatgttggtgtttagtaagttttggattttggagtattttggatttttagatgagggttgtttaatttgtgttttaaatataagtatgggtgtattttgatatttttagttttaatttagtaatatggggtttattttagttttttttttttttttatttgtaatttttttttttgatatggttacgaatgtttataaatatatttttttatttatttttttaattttaataaataaatagtggttttagaattgttaatttatatttttgttagaaatatatttattaattatagtatagtgtttttgtatttttttttttttttgtttttagttttatggttaaaatatagtttttttttttttttttttttttaaatttgagatagggttttgttttgttatttagtttggggtgtagtagtattgtagttttgattttttggatttaagcgatttttttattttagttttttgagtagttaggattataggtatattattatgtttagttaatttttttaattttttgtagaggcggggttttcgttgtgttgttgaggttgattttaagtttttggatttaaataagttttttgttttggttttttaaagtggtaggattataggtatgagttattatgtttgatttaaaatagttttttaaagttatttaggttagtttttttttttttattcgttttattgtgtttatatgagttatttgttagagtttgttttttatttttttttttatattttggttgatttgttgaatttttatattttaaaaattattttttgtagtgtatagttttatggattttgataaatggtagagttatatattcggcgtattgaatttttttattttttttaatttttttttatgtcgtttttttagagttaattttttttttattttttaaattttggtaatatggattttgtttttttttttataattttgttatttttagaatgttatatgaagggaatcgtatagtttgtagttttatagttttagatataatttatatattatttataggaattatatttgtaattatttattagagttaagaataaataatttttttttgtatatatttttgaataaagttttttatgtgaaaattgttataaataaatatatttattttgagtatttttttaattagaaaatatgttataaattaagaagatattttttagtttttttttgttttttagtttttagtttgtagtaggagggaattatattgaataggatttaaataaaatttaaaaatttaaagaattagttatttgatgaattagttttaagaaaattgtttagagttcgttagatgaagatttttttaaaataggatttttaataaaagttattataaattttggagttggggatttttaaaaaagtgttaggtagaaattttttgaaatttatattttttttcgttttcgtttttttttttttttttttttttgagatagggttttattttgttatttaggttggagtgagtggcgtaattatagtttagtgaaggtttgattttttgggtttaagttatttttttattttagttgggattataggtgtgtattattatatttggttaatttttttaattttttgtagagataggattttattttgttgtttaggttggttttaaatttttgggtttaaatagtttttttattttggttttttaaagtgttaggattataggtatgagttattgtgtttagtttttattttttttttttttttttatttttatgttttgtggttttagatttgtttatttgtttttttttttgtaggggtattataatattatttttgttggtttttagtttttattttttatttatttagttgattgaagtgtttttattggggaaaaaattgtgttttattatattttaaagtgatttgtgggttttgtgttgttaaaggatgaaatttggtttttttggagtggtgtttaaagttacgtattagtttttagttttagttttttttgttgtgttttttagttttataggttttttgatttttattggtcgtgttatgtttagttttgtataagttgtttgtttgtttggtatttttttttttgtttttcgtaaatgtttgttaattttttaaaatttaaatgttattttttatgtgagttagttttttttttttttattaagttagatgtttttttttgtggtgtttttatttatattatttgatgcgttggtttgtaatttatgtattttttttatttaattgtgatttatagggttattttagttgttttagttttttgagattttatgttaagtaggtgtttagtaaatatggtgaatgaatgaatgaaaaaatgagtgtaaaagatgataattattttacgaaaaggtttgggggtttttaaaattgaagaggagataatggatatattgataaatatttttaaggtattattttaaaattttaatataaaaataaaaattaaaaaattttaaaataaaaaattcgaatatatattttttttttttattgaggtaaaatttataaaaagtgaaatgtatagattttaagaatttagttagtggaggttttttgttttgttttgtttttttgagatagggttttattttgttgttcgggttggagtgtagtggtattattacggtttattgtagttttgattttttgggtttaagtaattattttattttagttttttaagtagttagaattataggtgtgtattattatattcgattaatatttgtatgttttgtagagatgaggttttgttatgttgtttaggttggttttaaatttttgggttgaagtaatttttttattttagttttttaaagtgttggaattataagcgttagttattatatttagttgttagttgagttttgataagtgtatttatttgtgtaattaatagattagttgatatagaaaatatttttattatttagaaagtgttttttttttaaaaatttttatttttataggagatttgatttttgttattatagattagttttgtttattgttgaattttatgtaaataaattgtatagtagatatttttttgtatttgttaaaaatagattttgttgttgttgttatgttttttgtttgttttgttttggagatagagtttttttttgttgtttatagtggagtgtagtagcgtaatttttgtttattgtaattttcgttttttaggtttaagtaatttttttattttagtttttcgagtagttgaaattataggtatgtgttattatattcggttaatttttgtatttttagtagagacggggttttgttatgttggtagggttggttttgaatttttgattttaggcgattcgttcgttttagttttttaaaatgttaagattataggtattatgagttatcgtatttagtttaaaaatagttttgtttattatattgtaaaatgtttttagagaaatagtttggttttgttaaggtttttttaaagatttaggagaattttagaagttgaagagatttagtagagggtgaaattgataaagtagaggcgagtgatttatagggaggaagaattagtggggtgcgtgtgcgagtgcgagagtaagttgtattagaagtttgggtgggattaggtttgagtatggtgttgatattggtatgtgtgttttttgaggtttggttttgggggagttgttgaggatttagatcgtagtagggtaagttagttttgtttttgtaaaaattgggagtatattttttttgtttaggatagttgttgggttgggagtttataggagagaaaggtggtaatttatatttgtagtttagagtagacgtgagtggttaggaaaagtggttatgtttaagggtggttttagtagtaagtttttttttattttataatatgaaaataggattatttttttttagtttatgttttaggtttacgtagaggttgtttttttgttatgtaatatacgtttgtaaagattagtatttgtttttttttattttttttgatttcgtttttttatcgatttagaggtttcggggagtagggaaggagtggggaagaaaatgggatagatgtgaggtttttggattttatgttaggatttgagaattgggaggttatagcgaaagagtgtttttatgatataggaaatttttttttatagtaatatataagtatatatttatagtttggttgttatatagagtagatgtatttatttaattatttagtattagcgatagttttttgttttaggtttgggagaattaaatagaaggtaggagtgttaggggttggagtagagttgggaggagtagttttgggggtaagtgaggaaaatcgagatcgttggttttttttattttgaggatagtgaagtgtttgtttttagggatattgtgtttttttattagttttatgtttgtgggagaatattggtttttaaaattcgttttagttttatttgatttattttggattttatgatatttttgaggatatggattaaggtttgggatgtgaagatttttggtgaagaggttttttaggtatagagagtttttttagaaaataaaaggatggatggtttagagttatgttttttttttagtgtttttttattttacgtgtttttattttttattcggtttttttagttttagtatttttttggttttttttttttttattaattttttttgaatatgtattagtttttttagtttttttttttgttggtttttatttgttgtttttgttttgttttgttttttttttgattttttattttttattagttatataatgattttattttttttattttgtttttttttttagttttttgtatttttttttttagaaaaaggattttttatatattaggtatttatgaaataaaagagttttgtgaagagaattatagttattgtaattaaggttagagtgattaggatgattttttatagttttaggtatttattagatttttttttattttttggaggggttgtatttgtgttggtgatattggaggttgcggttgttgtgttagttttattggaagatatagtggatttagggtaggggggttgtagtgattttattgggaggtgtggttggtttagggagcgtggttacggtgattttgttggataatgtggttgattttggaggggtggttatggtgattttattggaaggtgtggttggtttagggtagtgtttatagtaatttcgttggatggtgtggttgattttggaggggtggttatagtgattttattggaaggtggggttaatttggggggatgatcgtggtgattttattggaagttatagttggttaagaaagggtggttggttggttttattggaaatttggttttgtttattattatcgttattatgagtaatattagtgataataatagtggttgttatttaagaatgtttattatattttaggtattgtgttaagtgttatatataaattagtattaaaatttttataatatttttttgagatagaaattaatattatttttattttatagataggtaaattgaggtttagagaagttaagtagttagttttaggttagatagttagtaggtagtggaataacgatttaaattaaggtagtttgattttagagttagtttttaaagtttttaatttatgtattattttatattttaggtatgggggagttataagattagggtttataggggatggtgttatttttttaattatttatgatatttttcgattaaagaacgtaagagaaaagttgaaggtttattaagtttttttttaaatagtattgtgttttttttttagggggtagataattaagcggaatcggtttgggaggggattatgatgtgtatttttattatatcgggtaatttttttgaatataaaagtttggggttgggcgtagtggtttatatttgtaattttagtattttgggaggttaagataggaggattatttgaggttaggagtttcgattagtttggataatatggagaaattttgtttttattatatatataaaaaaattagataagtatggtggtgtatatttgtaattttagttattcgggaggttgaggtacgagaatcgtttgagtttggaaggtggaggttgtaatgagttgagagtacgttattgtattttagtttgggcgacggagtaagattttgttttaaaaaaaaaaaatagtttgggagttattggtttaagggattttagatggttttgatatatggattagtaaagaattagttatgttagtttgaagaaataagattttttgggatttaggaaagtggtttagtttttttgttggattagttagagttaaggtgagattgagtttttttttttgttatgtttattttttattttgttttgattttttattttattaataattaagtttttgattttttagatttttatagattttttttttatcgatggttttgttttttttttggatgtaggtgttgttttttattttttatatatgtttttgttttggtgttgtttggattaatataaggattgttaatttagatttgagggaagaattttaaaattgtgtgtcgatgttttaggttagggttagagttaagagagaaattaagtgagaagttgagatgaaaagttggtttgtggagagggaatagattggttttgtgttggttaggggtataaaatataagagttaaagttatgttggggtagattttagagagaattaaatttgcgtgagtgtggaatagtaatgttttatgaagtgtttaattagaggttagatgattgttgttagagacgttggaaatagatttttgtttattacgggtggttagatattaatttaagtttttttttaattttaatgcgtttatatttgggaatgatgtattatagagtaaataggtttattttttgggtagaagagttgttattgagaatagaacggaggatagatgttgggttgtattggagagaaagaagtaaaataattattttttttgttttgaagagaatgggggtaataaggatagagtgtgtgttttagaagttgttaatattttttttaaattttatttaaattttaagattatttttttttaaataaaattatttattattttttaaaagtagaaggaagtgaaatagttagtatgtaagggaaaattgtttttttttttttttgagatagtttgtttgtgtgaggttggaagggaaggttttttttttagtttcgatgggattaagttttagaagggaaaggtagaaaatgagaattttgagggtggagttttaaggtggagatttgagggttggattattaggaattcggaattttaaagaataggtttttaatttgaagagaagtatcgttagggggatttgggttgtaggggaagttggatgtttggtttttgatgtttttttatagaatgttatttttttttttttttttttaaagaaggtttttagggcgggtatagtggtttatgtttgtaattttagaattttgggaggttaagataggtagattacgaggttagtagttcgagattagtttggttaatatagtgaaacgttattattattaaaaatataaaaattagtttggtgtggtggtatatgtttgtagttttagttgtttgggaggttgaggcgggagaatcgtttgagtttaggaggtagaggttgtagtgagttgagattacgttattgtattttagtttgggtaatagagtgagattttattttaaaaaaaaaaaaaaaaaaaaaggaagaagaagaaggtttttaaagtattatttggattgggtaaggtttggatatgtaggttgttgtttttttagttgtgagtagtggtagaatttttaagtttagagaggagggtatagtagttagaaggtaggtgagggtggaggatgatttagttttattaggaagggtttggggaggagtgggaagtggaatagtttaagggtttgggtaatagagtaagattttgttttaaaaaaatagaaaataggtcgggtacggtggttcgcgtttgtaattttagtattttgggaggttgaggcgggtggattataaggttaggagatcgagattattttggttaatatagtgaaattttgtttttacgaaaaatataaaataattagtagggcgtggtggcgggcgtttgtagttttagttattcgggaggttgaggtaggagaatggcgtgaatttgggaagcggagtttgtagtgagtcgagatcgcgttattgtattttagtttgggtgatagagcgagatttagttttaaataaataaatagataaataaataaaatagaaaataaaaaaatttttatggagtttagttttaggttttttttatgatttgcgaatgaaggaattggaagttaattatttcgtttttatatttgttttttgtcgtttttttagttgtttttgggttttttttgttggttttagttagagttgaagtaagtttggattgtaagtttttagtttttaggtaaattgatagtgtttaaagtgtaggtatttttttgattatttggtttgtttggtatatagtattgatgagaagatttagttgaagtttttcggtggaaaagtttttataaattttttaaaaataaaaggggagcgtttttattaaggaggattagaagtaggagtatttttttttttagtgttattattttttttaggttttttgtagcgtgtgtgttggtaaatgtttaataatttatttttcgtggtgtaaatgtattcgttagagttgattgcgtgtgattagcgtgaattattgtgtatagaatgggaagtaatgggcggtatattattttttcgagtggttttataaatatttattttttgtattaaatttttttatgtttgaaatatttaaagtggtttttgtttttataagtgaattttgattgttatagtatttggtataataagaggttttagaaaattgacgtttaaaggtggtaatttgggattggttttttgatttattaggtttgagggtaggggcgattttatgttagtataaaatgaagtttttgtattatatagtaaaagatagaaaaagtgatttaagttattatttgtggtggtgtttggaataaagtaattgttgaagggaagggtcgggagtttaggtggtcgttgtgatagatcgtgaagttgggagtgttgattgtcgggattgtgggtggttgtattgggagattataggaaaaaaatgatttttttgttgtatttttagttaaggtattgttagcgaatatagagttttttttgaatattttaaaagatatgtttattttttaaagttatagggattatgtatgaaaaaattagatttatagtttgattttgtagattggagaattatatttaatttgtatttatatttttgttagtttcgtgtgtgatatttggaatatttgttaacggaagtttagaattggagtggagatatttgggtagattttgatgagtttgaaaaattttgaatttttaaatttcgtagagttttttttgttagtagaagtagtttttttttttttttgtgaggaagttatttttttttgtttgaagattttatagtgacgtttttatagtatttttttggtaaggggatatagattttttttaggttttgtattagttttttattgttgcgtgataaattattataaatttaggttgaagatagtataaatatattattttgtagttttggagatcggaagtttaaaataggttttattgggttaaagttaaggtgttagttggtttgtggtttttttggaggttttagagaagaatttgtttatttattttttttatcgttagaggtttttagtattttttggtttgtggtttttttttttatttttaaagtttgtatcgtagtatttttaaatttttttgattttgatttttgtttttttttttttttttttttttttgagattgagttttgttttgttgtttaggttagagtgtagtggtgtaattttggtttattgtaatttttattttttgggtttaagttatttttttgttttagttttttgagaggttgggattataggtatttattattatattcggttatattttgtatttttagtagagatagggttttattattttgattaggttggtttcgaatttttgatttcgtgatttattttttttagtttttttaagtgttgagattataggtgtgagttattgcgttcggttttttattttttttttataaggatttttgtgattatattgggtttatatagataatttaggataatttttttattataagatttttaatgcgattatgtatgtagagttttttttgttatataaagtaatatatttttaggttttgggaattgaaacgtggatgtttttgaggggttgttattttgtttattataggttttattataatgtttttcgtggtttttagttttatgcgttgagttagatttaggggttgaaaataattatagatgatagtgagtaaggaaataggggttttaattttaaatataaggaattggattttgttataattacgtgagtttgaaagagatgttagtttttagatgaggatgtagtttaattaatatttttattttaatttgtgagattgagtaaaggagttagttatgttggttttagattcgttttatagaattgtggtttgataaatgggtgttggtttaagttgttgtatttgtagtaagttattattgatagaaaataaatatatgggtgaatttattatatgttttagatttaaaatattagtttaagtaggtgtgagttgtattaatagttttttcggttgtttgaaatgtggatttagtggtggtttatattaaataaagttgagattttagtattttattagtataagcggaagaaaaaaattaaaagatttaggaagagagttatgttggaatggatttaatatgtgtaatttgtttatttatttttttattacgtttttttagaaggttttattgaaattgtttttattaaggtattagaagggagaggattagtatcgttgaaaagttttgtagtagttttttgttaaatgtaatggtggatgatttgattattgaaatgagttttttgattttagtgggtatggtggaatttttaggaaatagtaggtaggtggtagggttttttttttagagataagataggtatgattatcgatgtgggtattacgattagagttgtaattagggttttttggttatggttaattaattattaattaattaattattaaaattttatttgatttatataagtgaaaatatttaggtggttgaatagagagttgatttgagttgttatagatttttatttaatttttaggttcgaatttgtttatagatttagaaatgaagggaaggtagtaagatttattattattattaggatgtgtcgcgaattttttttttagtttttaaaaggaattttagttatttattatcgtgatagtgtaatggggaaatgaaaatatttaaatttttagggtaatatataagatattattgcgatttataagttagggtggagtttatggggtttagaatataaatgacgtggtcgggtatagtggtttatgtcggtaattttagtattttgtggggttaaggtaggtggattatttgaggttagaagtttgagattagtttgattaataaggtaaaaatttggttttattaaagatacgaaaattagttaggtatggtggtaggcgtttgtagttttatttattcgagaggttgagataggagaatcgtttgaattcgggaggcgggaggcggaggttgtagtgagttaagatcgtgttattattttagtttgggcgatagagtaagattttattttaaaaaaaaaagaatataaataatattttatttaaagtttatttttaggtttcgtttgcgtatatttttttatttttaagtgggaattaaagtaaggttataaggttgtttgagatattgttgattagatttaatgttgtttaaaatgtttgtggtatattagaaagttgtgtggagatattgggtagttagtagaagagttacggtataggtttttagagttttggagtaaaagtaagtttttttttatattttagtatttgatttaattttgggtttttagtatgcgagggtttatgaaatatgagttgttttttatgaattgggtgttgtttgtattattatattagattgggtatatttagtagtgtttatttttttgaatggaagtggtgtttgcgaatttggttgagttagttttttaaggtataagtaagaggtatgagtaggtagttgtaattttagtggtatttttagttatatttttaatttttttttttataattatagttatatgaagggttttttatgtttagttgattgagaaaggaaagatttggttttttttggtgtgtgggtggttttgtatgttattttaatattatagagagtaggttgttgtagtattattattttatttacggtagttttgtaggatagtggggaaggaaaatttttttagtgattcgaattgtaaagaatgtatttgttttgtttattttgtttgggtaaagagatgattagttatagttaattttgattaataggtagtggttaatagtttggttagataatttagggtgaggaaagatatggtgaattgatgataaggaagtttgggaaagaggaaggtggacgagttttttgggaagggtatagatggtgagagtatgtgtattttatgtgattgtttattaatgggcgtttattatagaggaaattttttatgatgaggttgattaagcgatttattttgtagacgttagttaatttttttttttagttgttttagtgttcgtttagtagggatatggataaagtagataggttggtagggatgaagcgtatgtaaggtttagtgagttggttttttttttattaaggttaagttggatagataatttatggttgagtgttttaattgttaatagtagagattagtgttggtttcgttatgtggtattattttttagagagaatggtagattaattatattagatttattttaatttaaagagagaggtgatttgtttttattgaaaatagttgtttgttttttttgtatataatgttttttgtagtattattgtttttgggtttattaaatgttttatttatcgttatgtgtttttaattatattttttgattaaggaaattataatatgttgagaaaatagttttagaatattttttttattttttaaattgagatataatttatatattataaagtgtatagattttatgtgtatattttaatgaagttttatatatttatatatttttgtaattattatttagattatatatagaatatttttagttttttttgtttgtttttgtaagaaggtttttttatgttttttttcggttagtttttttttttaaggtatttttaattttgatttttattataataggttaatgttatatggttttgaattgtatgtgaatggaattatatagtaggtatatttttgttttgattttttttatttaatattgattatgagatttattaatgttattgtgtgattttataggtttttttttttattattgggtagtattttattgtatgaatatgttataatttatttatttgttttaatgttagtggattttggggttaaatttttattttgtagtggtatgaatgaagttggtatggtatatgttttttggtggatataggtatttatttttgttggatatttatttttaggagtggaagtatcgagttatagggtatgtgtttaattttagtattgttaaatatttttttaagataattgtattaatttatatttttattaataatgtgtgagagttttagttgtttaatgttttttttaatatttggtattggtagttttttaaatgttagttattatagtgtgtgtatgtagtggtattttattgcggttttatattttatttttgataagtagtgatattgggtatttttttaaatgtttatcggttgttttgatatttttttttgttaattatttattaaatattttgtttaatttaaaattgtattattttttttttattgtagttttttttgtattttggatatgagtcgtttgttagttatatgtgttgtaatatttttttttatttttgattttttttttatagttaagaatatattttttaaaggtatatgttgatattaggttttaatgaagtttaaattattatatttttttttaatagttagtgttttttgtgttttgtttaagtatttaagtatttttgtttattttaaggttattaagatattttttgaggattaaatgatgattttttttttttttttgagatagagtttttttttgtcgtttaggttggagtgtagtggtataatttcgttttattgtaatttttattttttagatttaatcgatttttttgttttagtatttcgagtagttgggattataggtattcgttattacgtttggttgatttttgtatttatttagtagagacggggttttattatgttggttaggttggtttcgaatttttgattttaagtgatttattcgtattggttttttaaagtgttgggattataggcgtgagttattatatttagttaaatgatgacgtatttaaaggtttttgggatagtgattggtatataataagtatttaaaaaaaaaaaaaaaaaataaaatttgaaagaataaataggaaaacgaatacgtgtgtggttttgataatatatttattatgtgtttttgttttttagatatgttttggtaatatttatagtattatgaggaaatatagggatgagaaacgttgattttgatgtggcgggaaatgggagagaagatgttttgagggtggttgtcgtgattttttataatagaggttgagatttaggaaaaatttatagaagttttgatttgaagttttttttaagttagttaaagtttttgaggtttttttgttggttttttttttgatttagtttatgtttatttttatggattatattttgggaagttttttatgttttattttaattattttatgattattattttttttttttttatgatttttttttatttataatatgttttgatatttaatttatggttatagttattttgttttgtcgtggtttttttggtggttttttttgtgatttattttatggtgtttttagtggttttttttatgtttataatgttcgttatgatttatttcgtagttatttttatggatgtggtttagtttatggtttattttatatttaaagtcgtgtgtttttttatgttttattttaagtttttttttatgaattagtgtattttttaggttgtggaatgttttagagtttaggtttaagtttaggtttagattaaggttgtggttgtggttatgggggtaataaatattataatattttagggggaagaaaaggtttttttaaaagaaaaaaataaatatattgataaatgaaaattaagttttttttttttaattattatatatgtttgttttattaatgttagatttttatttttttaaattgtttatgtttttttttttttattattatttttattatgatttttgtttttgtttttttttttttttgtttttttatttttttttcgtttgataaaataagtttttttgttattttattaatatattatttttatgtgcgtatttaggttttagttttgtagattataaggttatgtgtttttggatttttaagataaaggtaaatttatatttttatgtgaaaggtatagagatttattttatagatagtttttttttttgttagttagttaagaaagtttagaataggtacgtggaattgagagttttagaaagttgtttatatagagttttgagattataggtatgaattttagaatttaattaatttgagttagagttttatatttgttatttattatatgtgttggggtaaatagttaagattatgaagttttagattttttatttgtaagatgaatataatatggttacgggattgtaggttagattaaataatattatgtattttaaatatttagttttgagtttagtaggtagtaaaaatttaatgtttattttcgttatttttttttgattttgtaaatgaaataataaagtaatttagggagtaatttttagatgttggtatttattatgtagtttatatacggagagaggttgagaattttaaaataaagaattttagtaaattgattatattatttaaattttttgtgattttcgtattttttattttgtttatttttattagtggtatgttgtttaatatttaataataggtttttcgagggaaaagtgttgatttgtagtgtttgataattgttgtggtgtaagtatttttaatttagtatattttaagttattagtgttatattatttagtttagaattgggaagaattgtataattttttgtgggttaggatgagttagttttagtatattattgatttatattttgttttattttttaaatggtaatttattcgtaggattataagaaaataggaagaatattaataaatgtgaaatcgatgtaagaaaaatatgtatttaaagaataattaagattagagagtagagatggagtgggaggttagagagtaatagttataggttatataaggaattgttgtgaggattagaaatttgttatatatgagataatcggaagttcgtattttggatggttgaatatttttatgttttttttttttttttatttttttttttttttttttttttttttttttttttttttttttttttttttagttttttttttttttttttttttttttttttttttttgtttttttttttttttttttatttttttttttttttttttttttttttttttttttttttttattttttttttttttttttttttttttcgagataggattttgttttgttatttaggttggagtgtagtggtacgatttttgtttattgtaatttttattttttaggtttaagtaattttcgtgttttagtttttaaagtagttgggattataggtttatgttattattttcgattaatttttgtatttttagtaaagataagttttattatgttggttaggttggttttaaatgtttggatttaagtgattcgttttttttggttttttaaagtgttggaattataggggtgagttattgcgtttagttgttttttgttttttttatgtttatgttttttttgtttttttttagtattttttttgttttgttagtatttttttttattttggttttaattttatttttttttttttttttttttattttgttttttattttttttgatttaagtattttttttggtttttatattaggttaggtgattttttttttttgagcgtattaatttattttttttttttattttggatttttttaaagtattgttgatatgatttttttttgtttttttgttaggtttttttatgaatttattttgggtatttattagataaaaatttagttttattgataatttaatagtagttataattgtagttagggaaatgaggatgatagtttagggttgtaaatatttatttggtttgattacgtttgtgggtgtgtggtttatgttaattgtgtttgtgtttatggatatcgggtttgttttttggaaggtgttgttggttggtttacgggtggattttgtggtggttttgacgtcgtgggttgaggtggtagatgatgtttttatagtggatgtatttaggttagaggtgtttaagattatttttggtatagtatggttggtagtagaggtcgtgaagtttattttaggggttatggtgatagagttggaggtagtgagtttggttttagtggttttggtgtttatgaaataggttatataagatgatgtatttgtagtagagatgattaaaggggaatgggggtgtttagattagaggagggtgaatttaataaatttatggtggaggtggtttaggagaggtgtggtgggggaggagagatggtagaaagcgattttgttgtggttatgtttttagaatgtaggtgggtgttatatagagaaggaggtagaatgtgttatttggtggagttggtgatggaggaggtagaagtttgaggaaacgttatcgcgatgggtttagaagtggaagatttatttgattttagaagtggttatttaaatagaagagggtgggttgataaaaatgaatgaattaatagtatttgtagtgatttggatgagattttagattatttttttaagtgaagtaatttaggaatggaaaatcgaatatcgtatgtttttattgatatgtgggagttaagttatggaaatacgaagatataagaatgatgtaatggattttggggattttgggggaagagtgggagggggcgagggataaaagattttaaatatggtgtagtgtatattattagggtgatgggtgtattaaaattttataaattattattaaagaatttatttatataattaaatattatttgtattttaataatttatggaaaaaattgaaaataaataaattaaagtagattaaataagtgggtgggttggtatataaagcggtaggttttgttttttttgtgattgtgattattgggtgtaaggagggagttggaggaggagatggtagaattggatttatttatgggtatgttagtggtcgtggttgggatagaggtgatattatttattatattgtggtgattagtaaaggtgaggtgagtgtgtttgggtagatgtaggaggatttgatttaagtggagaaggttgtttatagggataggagagggtgggtttagataggtgtgagtacgaattaatatagtagaggcggtggtggcggtttaggtagcgatgggtgtgtttaggttagaagtggttaaaatgggattataaatagtattagttatgagaatagaagtgagtatgtttagaattaagaggatagaattagatgtaatcggtttgttgatggtaagtgttagagaatgaataaaattgtttggttttagattggagtaaaggttgttaaattttttttgtaaaggtttaaatagtaaataatttaggtttttgggttaggttgtttttgttgtaaatatacggaaaagtagaaaagtagttggagataaattataaatgaatgggtatgattatgttttagtaaaattttataaaattaggtaataggtgagatttgatttatgaaatgtggtttgttagtttttggtttagagttaatatattgataggaggtggtagtgttatagatggttggttgaatagagataatttatttggtatcgaagtgggagtattttataaaattgtgatgggttagtagagttgaggcgggtttgttggaggaagatgtgatagatatgatgtatttgtggtttattatattgtggttttgattgtaatggaagtggtgggtatttaaaaaaaaagaggtgagattagagtagaggtaattaggattttagaagaggatatttttttttttttttttgagacggagtttcgttttgtcgtttaggttggaatgtaatggcgcgatttttgtttattgtaagttttatttttcggatttatattatttttttgttttagtttttcgagtagttgggattataggtgttcgttattacgtttagttaattttttgtatttttagtagagattggattttatcgtgttagttaggatggttttaattttttgatttcgtgattcgttcgttttagttttttaatgtgttgggattataggtatgagttatcgcgtttagtttagaagaggaaattatatttaattgtgtgttggtttgatttgaattagggtagagatgatagaaataggtgaatagttggtggttgttattggagttaaaatgtgtgggtttaaagaagatatgggggttagtatttgatataggtgtgttggtgatgggttggatagaaacgttagtggttttggtgagtataaacgtggtggaagagatagtggtggaggttgtagtggttttagaagttgtgatagagattgtggtggttttagagtttgtgagggaagttgtagtgggttttaagtttgtagtggaagttatggtgtttttagagtttatgatgaaggtagtgttggttttagagtttgtattggagggtgtggaggttttagaatttgtggtataggttgtgttggttttagagtttgaagtggaggttgtggtggttttagagtttgtagtggaggttgtggtggttttagagtttgtagtggaggttgtggtggttttagagtttttagtagaggtggtggtggttttagagtttgtagtagaggatgtggtggttttagagtttatggtagagattgtggtggttttagagattgtggtaaagattgtagttattttagagtttgtggtagaggttgtggtggttttagagttagtggtagaaattgtagtggttttagagtttttagtagaggcggtggtagttttagagtttgtgatatagattgttgtggttttagagtttgcggtagaggttgtggtggttttagagtttgaggtggagattgtggtggtttttaaatttgcggtagaggttgtggtggttttagagttcgtggtagagattgtggttgttttagagtttttagtagaggtggtggtagttttagagtttgtggtatagattgttgtggttttagaatttgtagtagtgattgtagtggtttttgaatttttagtagaggtgatggtagttttagtgtttgtggtagagattgtggtggttttagagtttgtggaggagattgtagtggttttagagtttttaatagaggttgtggtggttttagagtttgtagtagagattgtggtggtttttgagtttgtagtagaggtcgtggtggttttagagtttatagtagtgattgtagtggttttagagtttttagtagagattgtgatggttttagagtttgtggtagaaattgtagtgagtttagagtttttagtagaggttgtggtggttttagagtttttagtagaggttgtggtggttttagagtttgtggtagaaattgtagtgattttagagtttttagtagaggttgtggtggttttagagtttttagtagaggtggtggtagttttagagtttttagtagaggttgtggtggttttagagtttatggtagtggttgtagtggttttagagtttttagtagaggttgtggtggttttagagtttttagtagaggttgtagtggttttagagtttttagtagaggtggtggtggtggttttagagtttgttgtagaggttgggatggttttagagtttgtagtggagattgtggtggttttagaggttgtggtagaggttatggtggttttagagtttttagtgaagattgtggttattttagagtttgtagtggagattttggtggttttagagtttatggtagaggttatagtggttttagagtttatgatggatgttatggtggttttagagtttgtagtagaggttgtggtggttttagagtttgtagtagaggttgaggtggtttcggagtttttagtagaggttgtggtggtttcggagtttttagtagaggttgtggtggttttagagtttgtgatggaggttgtagtaattttagagtttttagtagaagtggtggtggtttttgaatttgtggtagaaattttagtggttttagagtttgtgatggagattgtagtggttttagagtttttagtagagattgtggttttagagtttgtggtagatattgtagtggttttagagtttttagtagaggtgatggtttttttagagtttgtggtagagattatggtggttttagagtttgtggtggagattgtagtggttttagagtttttagtagaggttgtggtggttttagagtttgtagtagaggttgtggtggttttagagtttgtagtagaggttgaggtggttttagaatttgtagtagatgttgtggtgtttttagaatttgtagtagagattgtggtggttttagagtttgtagtggaggttgtagtggttttagagtttttagtagagtttgtggtggttttagtatttgtggtggagattgtagttattttagagtttttagtggaagtggtggtggtttttaagtttgtggtggaaattgtagtggttttagagtttgtggtggagattgtagtgtttttagagtttttagtagagattgtggttattttagagtttgtggtagagattgtagtggttttagagtttttagtagaggttgtggtggtgttagagtttatggtaaagattgtggtggtttttaagtttgtattagaggttgtggtggttttagagtttgtagtataggttgttttggttttagagtttgcggtagtgattgtagtggttttagaatttttagtagaagttgtggtggttttagagtttgaagtagaggttattgtgattttagagtttttagtagaggttgtagtggttttaaagattgtggtggagattgtagttattttagagtttttagtataggtggtggtggtttttgagtttgtgatagaaattgtagtggttttagagtttgtggtggagattgtagtggttttagagtttttagtggaagttgtggtggttttagagtttttagtagaggttgtggtggttttagagtttgtggtagaatttgtgttggttttagagtttatgatggaggttgtggtggttttagagtttgtggtagagattgtggtggttttagagtttacggtagaggttttgattgttttagagtttgtagtaaagattgtggttattttagagtttgtagtggagattttggtggttttagggtttatggtagaggttatagtggttttagagtttatggtggatgttatggtaggtttagagtttgtagtagaggttgcggttgttttaaattttgtagtagaggttgtggtagttttagaatttttagtaaatgttgtgttggttttagaatttttagtagaggttgtagtggttttagagtttgtagtggagattgtggttttagagtttgtagttgagattttggtggttttagagtttatggtggaggttgtagtcgttttagaatgtgtagtagaggttgttgtggttttagagtttgtggtggagattgtagtggttttagagtttgtagtagagattgtggtggtttttgagtttgtagtagagggtgtgatggttttcgagtttgtagtgaagattgtggttattttagagtttgtggtagaggttgtagtggttttagaatttgtagtataggttgtggtggttttagagtttacggtggagattgtggtggttttagagtttgtagtagaggtgacggtggttttagagtttgtagtagagtttgtggtggtttttgagtttatggtagagattatggtggttttagtgtttgtgatagagattgtagtggttttagagtttgtagtggagacggtggttttagagtttgttatagaagttgtggtggttttagagtttgtattagagattgtggtgttttcggattttgtcgtagaggtggtggtgattttagaatttgaaatagagattatggtggtttgagagtttgtgggggagggggtggtggttttagaatttgttgtagaggttgtggtggttttagaggttttaattaggattgtagtggttttagagtttgtggtagaggttgtggtggtgttagagtttgtagcgggggttatagtggttttagagtttatgttggatgtcgtgattattttggagtttgtagttgaggttgtggtggttttagagtttgttatggaggtggaggtagtggtggttttagaatttgtagtagatgttgtggtggttttagagtttgtggtagagattttagtggttttagagtttgtagtggaggtggtggtggttttagagtttgtggtagagattgtggtagttttagagtttgtggtggaggttatggtggttttagaaattatggaggaggttatcgtttttttagagtttgtagtggaggttgtgttggaggttatggtagttttagggattgtagtggaggttatagtaaaggttgttgtggttttagagattgtggtggaggttacgatagttttagagtttgtagtggagtttgtggttgtgttagagtttgtggtgaaggttttagtggaggttatagtagtttttgagtttgtggtggaggtcgtgttggttttagagtttgtggtgaaggttgtagtagaagttatggtggaggttgaggttgttttagagtttgtggtagagtttgtggtgattttagagtttgtagttaaggtcgtagtagaggttatggtggaggttatggtggttttagagtttgtgatggaggttgtggtggtgtcggagttttttgtgaaggttgtggtatttttagagtttgaggtggagaataaataaggtggtgggaatgggttaaagatgaatttgtaggtttagtatagtgttatttttatatatatttagtattttttatttatttatttatttagttattgagggtttaatatgtatttggtattttattaaattttgggtatatttttgttagtaaaagggatatgggtttataatttagtaaagaagagagttataatataaaatataaatatatattggtttaagtgttgttaaagaaagtagtggtgttgttttagatattggagttagaaaaggtttttttgaggaattgatatatgaattgagatttgaaggataagaaggtagttatttgggttgggcgtagtggtttaagtttgtaattttaggcggattatttgaggtcgggagtttaagattagtttgattaatatggagaaattttatttttattaaaaatataaaattagttaggtatggtggcgtatgtttataattttagttatttaggaggttgaggtaggagaattatttgaatcggaaggcggaggttgtagtgagttaagattgtattattgtattttagtttggttaataagggtaaaattttattttaaaaaaaaaaaaaaaaaagaaggtagtaatttgaaaggttaggagaaggatattatagattgatagtataagtataaatattttgagttgttaatgagttcgatgtgatttatgaataaataggagattagggtggttggaatgtagttattgaaggagaaaacgaggcggtagagagattttttttaattataatttttgaagtaggatttttgtttttttaataatatataatttaaaggtgtatttatattttttatattttaaatttttttttataagaatataagtttatattttttttgttgataggggtatatttagagtttagtaaaatattatggtagaaaggttaaattttattttaaatataatgaagatttattggaataatatattttggttaatttttttttgtttttattttgaaaaaaaaaattataaatttttttgtaataagtataatataaagaatttttttttttgaatttgttttattattttttaatattttatatatttttatacgtaattataatatagttattaagattaagaaatttatatgaatatattgttgttatttgatttttagattttttttaagttttgttagttgttttaataatgtttttaatagtaaattagtttaatttagaatcgtgtgttgtttttcgttgttttgtttttttagttttttttagtttggtgtagttttttagtttttttttgatttttataatttttaatttttgaagattataggttaattattttatagaattttttttaaattgagtttttgtaatgttttattatgattaggtttatgttattaatttttgttaggaaaattattgaagtgatgttgtatttttttttttgtatattattaggtgatagataatattaatgtgttttattattgatgatgtttttttggattatttgattaagaaggtgtatttaggttggtttttttttttttgtagttagtaaatattgtgttgtgattataattatgaaatgtttttttttatttttaataatatatttttttttaagtttattttgtttgattttgaaatagttatttaatttttttttaaattgatgttagtatggttaatatatagtatggtcgtattttttttttttttatttttattttattgtttattttatttgtagttatagttagttaaaatgtattttttggttgaatattatttatttggggtttttttttttaattaatgtgttaatttttgttttttaattgtggtgtttggattatatatatttaatgtaattataaatacgttgggtttgatttttttttagagatagagttttgttttgttatttaggttataatgtagtggtataattacggttgattgtagttttgattttttaagtttaagaaatttttttgttttagttttcgaattatttaggattataggtacgagttatgatgtttggttaattattttttaatttttattttttgtaaagatggggtttttttatgttgtttgggtttgtttcgaatttttgggtttaagtaatttttttgttttagttttaaaaagtgttggaattataagtgtgaattattgtagttggttttgaatttaatagtttttatatttgttttttatttttttcgtttgatttttttatttttttttttatttttcgttttttttttttttaattaatttagtattttgttttttgttttgttttgttttttgagcgttttgatttgttatttaggttggagtgtagtgatgggattttagtttattgttaattttattttttaggtttaagtgatttttttgtttcggttttttgagtagttggaattataggtatgcgttattacgtttagttaatttttgtatttttagtagagatagggttttattacgttgtttaggttggtttttaatttttggttttaagtgatttatttgttttagttttttaaagggttaggattataggtataaatcgttgtattatgatttgagttatttttgattttattttatttttattattagtttattaaatattatttttatttgtgtgtttttgttttaggatttacgatatatatttttattattgtttattttttagtgagtttatttttttttttgtaaaggtatgagagttttaatatagtatatttttattttttttttttattttttgtattattgttgttatatattttatgtttatatataagttttataatttattattatttaagtatattattttttaaaatttaaatgaaaaaaattttatttttatttatatatttattatttttagtatattttatttttttttgtatagatttaaattttttttttttgaagaatttttatatttaaaaaaaaatgttagttttgtttgtcgatttacgtttgtaattttagtattttgggaagtagaggtaggtagattattaggagttcgatattagtttaattaaaattgagaatttttatttgtattaaaaatataaaattagttaggtatggtgtggttaattatatgtttgtaattttagttattcgagaagttgaggtaggaaaatcgtttgaatttagtgtgtttggaattggtgggtttttggttttattgattttaagaatgaagttatagatttttatagtgagtgttatagtttttaaggtggtatgtttggagtttgttttttttgatgtttagatgtgttcggagttttttttttttggtgggtttgtgttttcgttggtttatgagtgaagttgtaaatttttatagtgagtgttagtaatttttaagtttatgcgtgtggaattgttttttttttttagtgggttcgtgggttcgttggttttaggagtgaagttgtagatttttacggtgagtgttatagattataaaaatagtgtagatttaaaaagtgagtagtagtaaaatttattgtaaagagtaaaagaataaagtttttatagtgtggaaaacgatttaagtaggttgttattgttggttcgggtagtttgtttttatttttttatttggttttatttatattttgttgattggtagagtcgagtggtttgttttgatagggtgttgattggtgcgtttataatttttgagttatatataaaggttttttacgtttttattagattagttagatatagaatatggatatagaggttttttaaggtttttttagagtagttagatatagagtgtcgattggtgtatttataaattttgagttaaatatagggtgttgattggtgtgtttataaattttgagttagatatagagtgtcgattggtgtatttataatttttgagttagatataaaggttttttaaggttttacgagagtagttagatatagagtgttgattggtgtatttataaattttgagttagatatagggtgttgattggtgtgtttataaattttgagttagatatagagtgtcgattggtgtatttataatttttgagttagatataaaggttttttaaggttttattagagtagttagatatagagtgtttattggtgtatttataaattttgagttatatatagggtgttgattggtgtatttataatttttaagttagatataaagattttttacgtttttattagatttaggagtttagttggttttatttagtggatttcgtttcggggtcgtaggtggagttgtttgttagttttacgttatgcgtttatagtttttagttcgtgggcggtcggtgggattgggcgttttggagtagggggcggcgtttatcggggaggtttcggtcgtatagaagtttatggagggggtgggaggtttaggtatggcgggttgtaggtttttagttttgttttatgggaagatagttaaggtttagtgagaaatttagtgtagcgttagtgggtcggtattgttgggggatttagtatatttttcgtagttattggttcgggtgttaagttttttattgttcggggtttgtagggttcgttggttgtttcgagtgcggggtcgttaagtttacgtttatttggaattgtagttggttcgtaagcgtcgcgtatagtttcggttttcgttcgtatttttttttttatatttttttgtaagttgagggagtcggttttggtttcggttagtttagaaagggatttttatagtgtagcggtgggttgaagggttttttaagtgtcgttaaagtgggagtttaggtagaggaggtgttgagagtaagcgagggttttgaggattgttagtacgttgttattttttatcgggaggtagaggttgtagtgagttaagatcgtgttattacgttttagtttggggtaataagagcgaaatttcgtattaaaaaaaaaaaaaaaaaaagttaatttttaggaggtaaggttttttagtttttgtttgtttagaaaagtttttattttatttttatattgaaaatatttttatttcgtgtaattttaggttgataaagtattttttttttttagtattttaatgatgttgtttttttattttttggttgttatggttttttataggaagtttgttatgtttgtttttgtttttttttatataatgtgttttttttagtttattttaggattttttttttattattgatttttagttatttgattacgttgtattttggtatgattttttaaagtttattttgtttgatatttgttgagtttttgggatttgtgagtttatagtttttattaaatttaatttttttagttattatttttttaaatatgttttcggttttttttttttttggaattttaataatatatattgtagataaaatattgttttataaaattattggtattttatttatttatttttagtttatattttttttattttatatttttttttatttttataagattttgataaaatatgttaggttgttattttgtggagaagtttattttatttaatttagttttttgttttgttatttaggttggagtgtagtggtgttatttcggtttattgtaatttttatttttcgggtttaagggatttttttgttttagttttttgagtagttggaaatatagatatgcgttattatatttagttaatttttgtatttttagtagaaatagagttttgttatgttggttaggttgttttcgaatttttgattttaggtgatttgtttattttagttttttaaagtgttaggattataggcgtgagttatcgtattcggtttagtttagttttttatatttttttttgggttattgttgtttttttttttgtttaattttgatatttgttttgttttgttttatttaatgatttggggtttaattatttaggaagggaagagaaagtagaaaataaaattgatttatgtttttaaaagatgttgtgtgaaaacgggtatgtaggagggtaagagtgaaaaaattaagagtagtaattattgtttgaattaggatggtagtaggggagatattttttagtggatgaatataagttatgttttgaaattagaaaagtagaattaataggaagtgttgaaaggttgtatgtggtggatgatacgaaaagaagttaagaataatttttagttttggggtttacgtagagttggaaattagttttatttatttgaatgaatagggatgaagtggaagttggaaatattagattttgaattttttgtgtttattagatatttaggagattgttggtagttggaaatttgtatttagtttttagaggagaaattagattaaaagacgtgaaattggaagttatttaaatatatattgtatttaaagttatgaagttgattgagatcgtttgtttgggagagtatgttggagaatagggcgttggattaagttttggttattgtattatttagatagaggaggagacgtaaatgaatgagattgagaaggagtatttattaaggtagaaagaaaattttaaaaagtgaattaaggaagttaagagaatagagaggttttagaaaaatatggtagttaattgaattgatttttgtagagagattaagtaagatatggtttgggttatgtttattggatttagagataatatggaagtgagtttagtttattgaaaatagatttgtatgatggggtagattttaattggaatgaataaaagaataagtatatatggaggtttacggattttatagaagaataaaaagtagagaaataataaaatatatatttttataaggataaacgatggagagataatagtagaggagatatttttgtttttttgaaggtaataggtagatgagtggtaattttttaatataatagagaaagttttaatatataggtttttattgggggtgagagtaagttaattattggtagattattaattttgtggaattttggaaagattcgggaattgtaattgggtttttttaaagatttgggtgtggtatgtgattaaatataggaaggatagttgaaatataatgtagttaggaattgttttttagttttagattattttttttatttaagtatttggatgaatatattttttttttttttaatagtttagggttttatttttggagatattgaaattaaagaaattttagattagtaattttaggtattgttgaaggtaggagtgaaagtgtatttagaattggtgggtttttggtttgattttaataatgaagtcgtggattttcgtcgtgagtgttatagtttttataagtggtgtgttttgagtttgttttttttgatgtttagatgtgttcggcgttttttttggtgggttcgtgattttattggttttaggagtgaaattgtagattttcgtagtgagtgttataatttataaacgtagtgtggatttaaagagtgagtagtagtaatatttattataaagagtgaaagaataaagtttttatattatagaagagtatttaagcggattgttattgttggtttagggtagtttgtttttatttttttatttggtggtatttatattttattgattggtttattttatagagcgtcgattggttttatagagagttgattggtttgttttgataaggtgttgattggtgtgtttataatttttgagttagatataaaagttttttaagtttttatagagtattgattggtgtatttataaattttgagttatatatagggtgttgattggtatgtttataaattttgagcgagatatagggtgttgattggtgtatttataattttttagttagatataaagattttttaagtttttattagattagttagatatagggtgtttattggtgtgtttataaattttgagttagatatagagtgttgattggtgtatttataattttttagttagatataaagatttttcgagtttttattagattagttagatatagggtgttgattggtgtatttgtaaattttgagttagatatagagtgttgattggtgtatttataattttttagttagatataaaggttttttaagtttttattatatttaggagtttagttggttttatttagtggatttcgtatttgggtcgtagatggagttgttcgttagttttacgtcgtgcgttagtattttttagtttttgggtagtttatgggatcgggtgtcgtaaagtaaggggtagcgttcgtttgggaggttttggttgtataggagtttatggcggcgtgggggaggtttaggtatggcgggttgtaggttttaagtcgtgttttttagggaggtagttgaggttcggcgagaattggagcgtagtattcgttggtattgttggggaatttggcgtatttttcgtagttgttggttcgggtgttaagttttttattgtttggggttagttgtgttggttacgttagttcgaggtttagagtgtggggtttttcgaggttacgtttatttggaattagtgttggttcgtaagtgtcgtaggtagttcgggttttcgttcgtgtttttttttttatatttttttgaaagttgagggagttggtttcggtttcggttagtttagagagggttttttatagtgtagcggggggttgaagggttttttaagcgtagttagaatgggtggcgaggtcgaggaggtttcgagattgagcgagggttgttagtattttgttattttttaaaaggttttattgaaattatgtaattaaggaaatgtttatattttgaaatgtaaaatttatattatttatttttttgtttagtttttagtattttagtagttatgttagtatgttttagataggatttggagaattttttttgtggaaagaaattagttaatattagatattgatattttgaggatttttttaatttaaattgttacgtttttgttaaattattttaaagttaagtttattagttgataggttttatttttgtttatagagtttttaggtattatattagtgttttatttaaatgtaaaggatattttgggattattagatatttgagaaaaatttttagtttgaaatatagagattaaaataaatatttttatgaagtaaagttagagagaattgagataatgtaaatagtaaaattaattttaaatgtttttagtaatataagagaaagtatagtatttataaaaaaaaaaaaaagtaagagatgttattttaaaaatggttgtagagaaaaaaaagatttttttgaaaaaaaaaaattttaaaatttattagaaggatttgaagattttagaagttgaggaaatttttttagaagaaaaataaaacgatagagttggaagatagaagaagaaatataagaaaattagagtgttagtttaggaggttaaatatttaaattataagatttttttagaaagatagaatagagaaaatggacgagaggtaattattaaagaaaaaaatgtaataaaattttttagaattgattgatataattttttattgtgtaaatttttaatataatgaaagaatttatattatgatattatattatgagattttagaatacgtagttttaaaaatttgaaattttttagaataaaaagaatgggttttttataagaggttagtaatttaaatattagattttataatttagaatttaggaatagtggattaacgtttttaaaattttgagaaaaattatatttattttagaattttataattagttaaattatgagttaaatgtgagggtggaataagatatttttagatgtataaggtttatggatagttgggtttattttttttttttttttgggtatatggttaagttatatttgttaattttttttgtagttaggtagggttatatgtttaagttttagttagaggtttttgaagggaaggaatatatattaatttttattttatttttttaagagtaaatatttattttttgatttttgtttgtatatatatttttaatttttgtatattattatgttttgatattttaataaatttttttagttagggagagataggattttttagggttagttaatttttaaaagtagtaaagggtttagttaggagtatgagttgatatgtagattaattattttagagttatagtttttttatttggtttatatattttaggaaataatatttatttgttttagttattttaaagttaagtattaggtaattaggtggtaattagttatatagtttaaagaatataggaattatttaaattagttaattttaaattgtttattttgtttttttttgttttttttatagaaatttaataaaaggaaagatataaattttttttttatttttgttttttgttttttgattattttgatgttttttttaggtggtttcgtatggtagtgttatgttttttgtttttagggtttgtaagtttttttttttgtggttgtattttgattgattgtattataaaataatataaaatattgttttttttttttttttttgggttgaaatgatgatgatattggaaattatatgttgaagacggaagaattatatttatttaggatttttgaatgattgtatggagtagagtttttattattttataatatttattttaggattggtataagggagaaaaataaatttgttttttaaagttattttcgggatttttttgttatagtagtttagtattattttaatagtgtataaggttttaaaataattttttattataaatttttttttttaggaagtttttagagaaagtgatgttttaagatggaaaaataaagttagaaaaaagataagaatttataagggaaaaaagggaatttttagaatgttgttgaatatagattgtaggataagagatttagtaagtaattagtattggttggatagaggtttttaaatgggattgttttggttggatagaggtttttaaatgggattgtttaagggaaaaaagtgaaattgatagattgttttatgtgtttggaaaagatagggatatttttggtggaggttttgggatgaattaattatatatatgaagaaaattatggatattttaaaaatgaggttattattaatatttagaaaaataaaaattataagaacggatggttattataatgtaattatatgatttagttataaatgttattagaggttatttatatttattataatgttattataatgtaattatatgatttagttataaatgttattagaggtaaaatttatagttattataatgtaaatattaaatgttagtttaatattaaaaatttgatatagttatttggggagaattgtgagcgggaatgtgagatagtaagtgtgtagggggagtggtttaatttaaatttttttttttattagaaggaagataataaattatgtttaaagtaggaaaaaaaatttaaaaaattttaattaataaagaagtaatggtagtaagagaatttatggtcgggtgtaatggtttacgtttgtaattttagtgttttggaaagttgaggtgagaggattttttgagttcgggagtattaggttgtagtgagttatgatggtgtttttgtattttcgtttgggtgatagagtgagattttgtttttaaataaatagataaatgtagtatgaacgtaaatgttaataggaattttgggaagtaggatttagaataagaagtaattggggtaagggaattaggggttgaagttttatgagaagttttgtaggattataagtattttttttttagaattgtttatatttattatttaatataataaaataaaataaataagtgagtgggaggtgagaagtgatatagtaagtgtggggaagttttttaagaatgggggtgaggggttaggttcggtagtttatattcgtaattttagtattttgggaggttaaggtgggtagattgtttgagtttaggagttcgagtttagtttgggtaatataatgaaatttcgtttttattaaaatataaaaaattagttgggcgtggcggtgtgcgtttgtagttttagttatttaggaggttgaggtaggagaatcgtttgaatttgggaggtagaggttgtagtgagtcgagattgtagtattgtattttagtttgggcgatagagttatattttatttttaaaaaaaaaaaaaagaatgggggtgaggaggagagtggagggagaggtggtggttgaggagtgatgcggggacgttaggatggatattatttagtgtttggtttagggatttttgggattatattgtttgaagaatttacgttattttattaagtttattgaattaagattttgtttggtggggtgttagggtttggaaatttaagtttttaatcgtttttttggatgatatttgtgtatatagaattgagtttgtttggatgttgatggaaaggatttaagaaaggtaaagtgagatgggaggggaaggagaaatgtattgagtaaagtttttgagacggtaggagggtgagacggcgtttagtatttagatggaggagttggtttttgttaatttattgtaatggggttataggagatattgttggttattttatagatttagtggtaggaaaagaggaggggttttttagtttttgtatatttgtttttttttgttaggaaatattatttaagtttatgttttatagtagattaagtgttttatgggggttaagattatggtattttttattttattttttattatggtttagtacgtagtagtgtttggtttagaggaggagttttataaatgtttgttgaatgattatatgaatgatagttttttttgaggtaaggggatttttgtttaaaattagatagataggattggagtttaggattaggataggcgacgggtagatttggaaggtatgggtaggtagagaatagttgaagtatttagggtgaaggtaaggggaaagagaagaaaaagaacgtcgagggaagtgttgaagcgggcgagggagcgaatttagagtggggtgtaggaaatagatgtatattgaggaagaagggggaagtattttaaattttttatattatttaatttatatttttttttttaatcgtattttttattttttgacgagttattttatagtaaaggtaatggaatggatgagttaattaatttggtgttttataattagggaagatatgttgatgtaagaaattaaagattggagtgaatagtattattttagatagtttattggagttatacggagtttaatttattttttttttgggttgtttttttttatagttattgttgatttaatgttagagttaattttttagtggtcgaatttcggtttgtttttattagggaagtttttaggggattatatatggatttggaattaggtagtattcgaagaagggttgaagtaaaaaattaaaaaatagtagatgttggcgtagatgtagtgattagggaatatttttatattgttagtgggaatgtaaattagtataattattatggaaaatagtgtggagattttttaaagaattaaaagtagatttattatttgatttagtaattttattattgggtatttatttagaggaaaagaagttattatataaaaaagatatttgtatatatatgtttatagtagtataatttataattgtaaagttatggaatttaaatgtttattaattaacggtggataaagaaattggtatatatatacgatggaatattatttagttataaaaaggaatgaattaatggtatttgtagtgatttggatgagattgtagattattattttaagtgaagttatttaggaatggaaaattaaatatcgtatgtttttattgataggtgggagttaagttgtgaggatttaaacgtatgagaatgatatagtggattttgggtattagggaggaaggacgggggaggtacgagagataaaagattatagatagggtgggtgcggtgtatattgtttggtgacgggtgtattaaagttttataatttattaataaagtatttatataattaaatattatttgtatttaaataatttatggaaaaaaaataaagaaggattgaaggatttttatttgattttagattgagattttggttttaatttggaattaagaatgttattggaattagagtttttcggttaaaaaaaaaaatttttatttaagatataaaggaaagtaaaattttatttttttttatttttttagtatcgttttatcgttttattatatgtgtttataattatagttgggggagattaatatagatttgtttttaagatagtattagaattatggttagtggaattgggattagtattggtttttgtagaaatgggtaaaaaaaaaaaaaaaaaaatgaattattattgtttttggaagaagagttatgtttgggtaggggattttttattttttttagggtttatgtggtttttatgtttttttttttttttaattgttaagttatttattgggttttagaagtttaaagagaagtagttataggaattagaaagtaggagagatattttttttttttatttttaaatgatgtatatagaagttgttatttagatgtttgggttttaaaggaaggataggttaaagaggtagagagataaggggtaaattttttgggttttgatagaaaataaagttgtataaaaagatttaaaggttagttagtgttagggtaagttttgtaggtagatggtatggttggggggagtttttaaattgttttatagtttggttttttattttttttttttttttttcgtaaacgtgtttgtggtatttatagttgatattgagtaggggaggttagaattttgggttttttttttttagggaggggtatttttgcgttgtgttttttgtagggtcgtttggagagatgtattttataggaattaaggcggaggagagagtagagtcggtaagattagagggcgtatatatgaggaggggtagggagggaggtagaatgaggggattaaatttgtcggagtggaagggatttattttttgaattagagttgatttgaaatttgttttttttgggtatgttttatttttaaagtaggaggtttttgtagaagaaagaaggaagaagagaagaaaaggaaataaatggatggtaaaggttaatagtagtttatttaggggaagttggggatttggagggtgataagagtattaggatatacgttcggttttttttagagtgtttttttttagttgtagagtagtatatggttacgtgagtgatatattttattttttgtgagttttttaagggtggggaaagtggatattgagtgagttttatttttagtattaagcggaagtgagtagggaagaggatggggtacggaattatttatttttttgagttaatttttggtaatggtttttaagtataggttagggattttgatttatttgcgtttttatttttaggtttataattagtagttgattgaaatttatttcgtgtaatttagatatgtaaggaaaaatgtagtttggtttgttataatttatttaatttagtttttagatttttttttttattaatggtagggaagtttggggttggaaatgaggatacgggtataagtttgttaaatattggtgatgaaattttatttttttttaaaagtgttttttttggaaggtatattgtatggttttaattatatgaaagttaagtatatggaaaaattaattgatgatgattaaagttaaaatattggttatttttagggtggtattgatggggaggaggtaggggaggtttttggggtgataagaatgtggtatattttgatttggaaagcgggtaggtgagtgtatgtatgtgttaagatttaataattggtcgggtgcggtggtttatgtttgtaattttaatattttgagaggttgaggtgggaggattgtgtgagtttaggagtttaagagtagtttaggtaatatagtaagattttgtttttatttttttaaaataaatatattaaagaattaaataaaatttaacgatttgagtatttatgtgtttattttgtatattttattgtatatattttaagttttaatttaaagattaaaaataatagttaagggtataaatttttagttataagaagaatgagttttggaattttaattatatggagattataattaataatattgtattgtttatttgaaatttgttaatatatatagaaaagaaatggtaaatatgtgttggtgatgtgtttattagtttgatagtggtaattattttataatgtatatttattaaattaatatattgtatacgttgaaaatatataatttttgtttattttattttagtaagtttggggggagaattaaaaataataagaaagaaaaaaattttggtggtttacgtttgtaattttaatattttgggaagttaaggtgggcgggttaggagtttgagattagtttgattaatatggtgaaattttatttttaataaaaataaaaataaaaataaattagttgggcgtagtggcgggtgtttgtaattttagttatttgggaggttgaggtaggagaattgtttgaattcgggaggtagaggttgtagtgagttaagatcgtattattgtattttagttcgggtgatagagtgagatttcgttttaaaaaaaaaaaaaagaaagaaaaagaaaataatgttttaggttttttttgggtaaatatttggttatatgaaatttaatgttttttttaggattgttttttttttattttaagggtttttttttttattttttttttgtacgttttttgagggggaatttatgttttttattggtaatgtgggaataagatttcggttttttaagttggttttttttgagttttttttcgttttatttggttattgggattttgtattggtatttaacgattttgagatatagtattattattgtttttattttataaataaggaaattaaattatggagaagttaagtaatttggttaaatttataaagttagtaagtgatggagttaggaattaaattattagtttagttgtagagtttgtgtttttcgttattataaaaggaggttgttatgtttaaataggattttgagtttggtttttgaatatttttttttaattagattgtttgtttttaattttatttgatatagaaattttggagttgttattgttagaaagtatgcggaatataaaattataaagttatagaggtttagttatgtggaatttgaaaaatagatggacgagttattataagggatatgtcgggaaaattaatgagttaagagtaggttgttcgagtggagttgattggttcgagaatatttttttaaatgtttttttggagagtttgagttatgagggttttgatgattaggaaggaaagagtaaataggggttgtgggtttaggatttgggtttgttttagagagtaagagattagtttcgtatagagtagggaattttagggattcggtaattacgtagagtatataatttataaatatagtatagatttgaaattcgtttttgaatgatttgtgttgaaagtttgatttaggaaaggtttgtgttttagattttcgttgttattttttttaattttattttgtatcggtttagattttttttaatttggttggataaggggtttgtttttttttttaattttagtttatttttaatttaagtagagttatttttattataaggagttttaatggtattttttatatagtatatagtttattagaaagtaataaaaagaagaagattttttgtgaaatatagtttgatatggtttatgtttgtgatttatttttttataaacggattattttgatggtagttattgtttttggatttggagattttttttatagttgtttaagtttttttagttatttggagttattatttgtgtagaaatgttttatgtgtttgagtgtttatttttaaattttttgttgtgtatacgtttaaaaataattttgaaaagttgtttttttttttttgtttatgtttaatttaaattttttattatatatttaattattgtaaagaatgtaatttttattatattgtaaatgtagatattgaaataataaaagtttttattattttttaaaatgtttttagtagattttaaatattagtagtattttaatatttattattattttttttttaaattttattttattttaagagatgtggggggttttattatattgtttaggttggtgttgaatttttgggtttaagtaattttttcgttttagtttttttaagtgttgggattatagacgtgagttattgtatttagtttttattatttttttgaataatatataagtaagtttttttttaatagtttaggtttttaaatggttttttttgttttacgaatttatagttttattttattttttttatattattttattggtttttttttatatattatattaaatattagtaatataaatattttattgttatatatatattatagtatgtttaattaataaattttattttttagagtagttttgggtttatagtaaaattaagtggtaagtatagaggttttatagattttttgtttttacgtaagtataatttttttatttcgttgacgttagggtttatttttgtatattttatgggttttgataaatgtataatgataggtatttattattgtagtattatatatagtagttttacgttttaagaattttttgtgttttatttatttattattttattttcgtaatttttggtaattattgatttttgattgtttttatagttttgttttttttgggatgttatatggtttgtaataattttttgtttgaaaagtttttattgattattttgttatatttttttgtattaaaagatatgtttataaacgtttaaaaaattttttgtgttttgtaagattttgtgtttaatttatagtttttagtaattttttggtgaattaagtaaaaatgttttttttatgatacgtttttttatatttttaagaaaatatgaattattaatttatttaatattttttattttttatttttttgagacggagtttcgttttgtcgattaggttggagtgtagtggtgtaatttcggtttattgtaatttttattttttaggtttaagttatttttttgttttagttttttacgtagttgggattataggtgtttgttattacgttagttagtttttgtatttttagtagagatggggttttattatgttggttaggttagttttaaaagtttgattttaggtgatttattcgttttcgttttttaaagtgttgaaattataggtatgagttatttcgtttggtttatttatttaatattttaaaaataatataatttatagagcgtttacgaaatgtaggattattttaagtttttataataattttatgaagtgggtattatttttatttttatgtttataaatatggaaattgagatttagaagaattaaggaatttgtggaaagttataatgaaattggatttgaaattagaaattcgagttttataatttgtgtttttagttgatatgtcgtatggtttttttaagtgttttttattttaaggtgtaatattaattagttggagtttataatatttttttttttgaaattatgttaaatatataattgttatttaaattaagaaattagtgaataggaagttttttttttttatagaaaatggtgtataatttagggaagtgtgttttatagtatattgttttgttttagtaagttgttgataaattttgaatattttaaaataggtagatagatagataaggtgggttggttgttatgggatttttttttttggttaaataagttattgttttttttattttttttgttgattttgtttttgttttaattttatgagatatttttttaagagggatgtatttttaaagagtggatggaagagaagagattgttaaaaaaaaaagaaaggaaaaaaagaagtttttattatttttgttattttattttatagtgtatttgcgtaaataatattttaatatatgttaaaattattagttttttatattttacgtagttttttataggaatttatatgaggtaggagaaaataggaagttttattttgggtatatgatttttaaattagaggtggtttttgaggtatttttttattaaaaggttttatttgatattttgaaatgttttatattttgcggaaatgtggtaataataatatgggagttatagaggaaatgttggatgtttattaaagaagagttagaaaagtgtagttttgattatagaggtgtttttagatagattagttttaggttataagtatatacggaagttgaagatttggaaaatggtttttattaaataatttacgtttgtataatattttttaggaagtttttatgtacgtttaagatgtgggggtatagatgttacgtgaagattattgtgttaaatttatagtgtaaaggtataggtttagatgggtagttttttaattttgtttattttttggatttttgtttgggttacgtatgtttggtgggttggggttttgttatattataggagtaggtgtattttatgacgaaagttgggtaatgatgtttttaaattttatttgtatattttagttgttgggagtaatgagatatttatagtataattatgtgaattaattataaggtaaattgtttattagggatttttttttttttttttttttttagtttaaaatgtttatttatttgagttatttgttgtttatttttggaaataattttttaaaatttgagatagagttttattttgttatttaggttagagtgtagtgatatgattttagtttattgtaacgtttattttttaggtttaagtgatttttttgttttagttttttaagtagttgggattataggcgcgtattatcgcgtatggttaatttttgtatttttagtagagatagggttttgttatgttggttaggttggttttaaatttttggttttaagtgatttgtttgttttagttttttagaatgttgggattataggtgtgagttattatgttcggttaggaaataaaaatttttatttatataatgtgtttggtaaaaatttaagagttgtattgagttataatttatatattatatagtttatttgtttaaagtatataaatttggttgggtaaggtgggttatgtttttaattttagtattttgggaggttgagatgggtggattatttgaggttaggagtttaagattagtttggttaatagtggtgaaattttatttttattaaaaatataaaaattagttaggtatggtggtattcgtttataattttagttatttgggaggttgagggaggagaattttttaaatttaggaagtagaggttgtagtgagtcgagattgcgttattgtattttagtttcggtgatagagtgagattttattttaaatttaaaaaaataataagaataaaataaagtatataaattagtggttttaggtcgggtgtagtggtttatgtttgtaattttagtattttgggagtttaaggtgggtggattatttgaggttaggagttcgagattagtttggttaatattgtgaaattttatttttattaaaaatatatatatatatataaattagttgggtgtggtggtacgtatttgtaattttagttattcgggaggttgaagtaggagaattatttgaatttggaaggtggaggttgtagtgagttgagattacgttattgtattttagtttgggcgatagagtaagatttcgtttaaaataaataaataaataaattagtgttttttagtatatttatagagttgtatttggtgaagttttttatagatagatttaaattttttttttttattttagtttttttttttttttttttaattttttttttttatttcgtttttttttttttgttttgagttttattatttgtacgttagtttttttggatttattttttaaatgtattatatttgtcgggtgatttttatttttgtataattgtgtttgtttgagttatttttcgcgtttgttttttcggattattagtataattttttataatggttagttttttttaatttgtttattaaaatttgaaaatatatgttttattatttttttaaaaaatgatttagttggatatttttgtttgattttatttttttttatgtttttttatataagggtttttatagtttttattagtgggaggtatttttttagggtgtttaatttgttttttttttttggtttttggatttttttaagtgagtagatgatgatgattgtttgtatatggtttagcgtggtttttttgttttttagtgagtaggggtatgtaaatttttttttaaagattgagggagttgagaggttgtggagataaagtgattttattttggatgttaatttgttatgttgatttttgattaatttaggttttatgagttatatgggttttatttttattttatttattgtttttggtaaggatatgtatttattgtaaattttgttttcgttttttgtttgttgttttgtttttagagatagggttttgttttgttatttaggttggagtttagtggtgtaattttagtttattgtagtttttaatttttgggttgtagtgatttttttgttttagttttttaagtagttgggattataggtatatgttattatttttaattaattttggtttttttttttgtagagatgaggtgttgttttgttttttagattggttttaaatttttgtttttaagtaattttttttttttttttttttaaagttttgggattataggtattagttattatatttagtttttgtttttagattaaagtaattttgatattatggtataaattataggttacgacgtatatagtatttttgtttgttttgaaaggttgtttttaattgtttttataggaagtatatatttttttcggggtaagttttgggtttgggggtaataggtgtggagatttatttgatttgttgttatttaagattatatttttgtttgtaaattttttagtaaattattatttattgataaattggatttatttgttttgtttttggtttttcggtttttttagcgtttgggagttattttatatgtatgatttttttatggaataaaggttgaatgaaataagtggttaataaatttagtttttttaaaagaaattttgaataaggattaagtaatagaagttacgtttgggagagttgtaagacgatggatattttagaaaatattttttttatagtaaggttttagggtaaaatatatgtagttggttatattttagatttttttgttaaaatttataattatttcggaggttaaagaagtatgtttgtgaagggttatttatgtagtaggtattgtttgaagattgtgttgtagtgtattttgttatgtaaaagtggattattggttattatgatgtgtttagaattggtggttttttggttttattgattttaagaatgaagtcgtagattttcgcggttattgttatagtatttaaggtggcgcgtttggagtttgtttttttcgatgttcgtatgtgtttatagttttttttttttggtgggtttgtggtttcgttggtttaggaatgaagttgtagatttttacgatgagtgttatagtttataaaagtagtatggatttaaagagtgagtagtagtaagatttattgtaaagagtaaaagaataaagtttttatagttaggaaaaggattagaacgggttattattgttggttggggtagtttgtttttatttttttatttggttttatttatattttgttgattggtagagtcgagtggtttgttttgatagggtgttgattggtgcgtttataatttttgagttagatataaaggttttttacgtttttattagattagttagatatagagtgtggatacgaaggttttttaaggttttattagagtagttagatatagagtgtcgattggtgaatttacgaattttgagttagatttagggtgttgattggtgtgtttataaattttgagttagatatagagtgcggattggtgtatttataatttttgagttagatataaaggttttttatatttttattagatttaggagtttagttggttttatttagtggatttcgtatcggggttgtaggtggagttgtttgttagttttgcgtcgtgcgtttgtattttttagtttttgggtggtcgatgggattgggcgttttggagtagggggtggtattcgtcggggaggttcgggtcgtataggagtttatggagggggtgggaggtttaggtatggcgggttgtaggttttaagttttgtttcgcgggaaggtagttaaggtttggtgagaaatcgagtgtagcgtcggcgggttggtattgttgggggatttagtatatcgttcgtagttgttggttcgggtgttaagttttttattgtttaggatcggtagggttagttaagtttacgtttattcggaattttagttggttcgtaagcgtcgcgtgtagtttcggttttcgttcgtattttttttttcgtatttttttttttatatttttttgtaagttgagggagtgggtttcggttttggttagtttagaaaggggtttttatagtgtagcggtgggttgaagggttttttaagtgtcgttaaagtgggagtttaggtagaggaggcgttgagagcgagtaagggttgtgcggatttttagtattttgttattttttaatggtagttttgttttaaaatggcgtttttgttgtcgtgtaataggttgtatttttatattttattttttaaaattggttttgataattttacgtgtttattttttttatgatagtttttgggtttaaagggaggatttttgatagtgtatagttttagtagtagtgcgttggttttattggaggtagataatatagtagtagtaaaggtttaaataagatagtaaggaacgtacgagtatagtatttaaattaagaagtagtttatgttattaggtgttttaggatttaaattagttgtgaagttaattatttaaagtaggggtttgagagtttggttatgtgggtttttatattagttattaatttagcgatattaattgatttattaggaatataaatatagtagtttttttaattgtataagtgtttcgttgtgtagcgtgagtatatgtaaagtttggtaatttgggaggatagatttttttatgatagtgatttttatgtttaaaagagagatttttatgtagttattatttaaagttttttttttttttattttttgtagagtttgtttttttaattttttgagttagagtttcgttttattatttgggtaggagtgtagtagtacggttttggtttattgtaatttttattttttaggtttaagtaatttttttgttttagttttttaagtaattgggattataggtatgcgttattacgtttagttaattttgttattttttgtggagatggggttatatcgtgttggttaggttgatttcgaattttcgattttaattgatttatttgttttggttttttaaagtgtagggattataggttttatagagtttttatatgttagataatatttttaataatcggatgaggaagataaatggaggttaaataattatattaataaaaaatagattagaattagtgggattttaaatgagggagattgataggttttgtagtgtgtgaattatttagtttgtgttcgtgtataatttaaagaatatttttttaaatatgtagggggtaattaaggttataaattggtattatatatttaggaagttttatttggggttaattaaaagatttttgtatatagtgttcgttttgtaatatgtttaatgagtattttattatattatagtatagtatataaaaattagttttttgttatttattatatattttttgtgtaatttggttaagtatttttagaatgatttatttgtttttaagattgaggagtaagttgattaatatggttaaaagacggaattaattaaataaatttagtttgtttttgggtattaggttgttttgttttttatttagggtgttgttattttttagtaggaaatagtttatttagtttggggttatttgtcgttttaagttcggtgtgtttttttttcggtagtatatttgttggtatttttatgtgtaaaagatattggttgttaatgaggtttgggagtaagtaaagtagtcgttttaattatttttatgggaatagtggtaggtttgggggatcgttgttttagacggttatatggggtaggcgtttttgttttggttgaatttaaagaaataaaggttggagataatatatttatttgtttatgtaaggtaggttttttaaattagagtttgaatttgtgtttttaatagattggtattttttttaattaattttgttgtttggaggttttatgggagataaaagtgttatagtgtattatgttttttggtttagttttgtatgttatatttagcgaaatgggtttttcggttattgttaatgtgttagatatatttatatatagtattgagagtttttaagtttttaatagtattggtttgattagtttgtttatagggagaattttgtagtagtttagtagcggtgtttatgtaggttaatatgtatttatttttttggtttatagggatagtatttaaataatttatttgttaatttgttatatggtggatagttttttgaatatttgaatgtgttttgtttaatatgatttataatagagaatatggtaaataatttgtaagagttgttgggaaggtattatatattttttgttgttgttgtggagatgggatttcgatatgttgtttaggttggatttaaatttttggttttaagtaatcgttttattatggtttttttatgtgtgagttattgtattaggattaggttattatatatatatatatttttttttttttttttttttttttttgagacggagttttgtttttattgttttggttggagtgtaatggcgtgatttcggtttattataatttttatttttcgggtttaagtagtttttttgttttagttttttgagtagttgggattataggtgtatgttattacgtttagttaattttgtatttttagtagagataggtttttttatgttggttaagttggtttcgaatttttaattttaggtgatttgttcgtttcggttttttaaagtgttgggattataggtatgagttatcgtgtttagtttggttattatattttaagagtaattttgtttttttgattgttttttagtttatttttgtatttttgtgattatttttgttatgtatttaggttaatagtttagaggtttgagttggtatgatgtttttaattttttttagggttttagtttttatgttttgtggaattgagtggtttttatgtgtagttatttgaaatatagttaaattagttataaggttttgcggtttttttcgtatgttttgttatatgtttatgttttatataggtttgtgtataattatttatttttttagtttttgttgagttagttatataattaggtttttgaatatagtttagttattagtgtaaagaattaggggttaggtttatatgtgattattaattaggttgtttgtaatttattttagtggtttttttgatgtttatttgtattaaattagattgtattagtttgtggttgtgtagtaatagcggtttaagaatagcggttttttttgttggagttttttgtatattaagtattatttggatgtttattatgttaggtgttggagttggagagggttaggtggtattttttgtttgtttacgttataatagagtttaatgtagtatgtaattttgggtttaagggatttattgttagtatttttttttgttgtaaataattatgttatttatttaaggtaggtgttggggttatagcggaggtgggttgtttaaaaatttttttaattattttttgattggtagatttatttttatagttatgggaagggtttttgttagtaattttatttgttgtaaagtattttttattattagtattttttgtttaataggagagtatttggttttggttttttttttaaaaggattgattttttagattgcggttgttataaggttttatttatatttttaggagtagtagtaatatttaaagttttagttgtattttttaaaggggtgtttaaggtttgtgtttgttgtattaatattttagtttgtttaaagttttttgttgtggtgtgttttaggtttaatgtgttttttttttgataagtttgtatagggattttaaaaattgtgttaagtatgggatgtatattttttaataatttaaaagatttataaatgtttggatttttttgattgtttttggagttgatattgttgggttttgttaattattgtatttagtattaaaggagtgttatttaattatgtaatttttaaaaattttattgtgggtcgggtgtaatggtttatatttgtaattttaatattttgggaggttaaggtgggcggattataaggttaggagttcgagattagtttggttaatatggtgaaattttatttttattaaaaatataaaagttagttgggtatggtggtaggtgtttgtagttttagttattcgggaggttgaggtaggagaatcgtttgaatttaggaggcggaggtggtagtgagataaggtcgtattattgtaatttagtttgggtgatagagcgagatttcgttttaaaataaaataaaataaaataaaataaataaataaaaaatttttattgtgggttttgggttttgtattttttgaggattgatggtttatttttattttatagatgagtatttaatattataagatattattgtaaattaaaataatatggtattggtataagaatagatatatatattagtggaatagaatagaaaatatagaaataagattacgtatttacgattatttgatttttaataaatttgacgaaagtaaataatggggaaagaattttttgtttaataaacggtgttgggataataggttagttatatgtaaataatttaaattggattttttttttatattttatataaaaattaatttacgatggattaaagatttaaatgtaaaatttaaaattataaaattttggaagataatttaggtaatattatttaggatataggtatgggtaaaaattttatgacgaagattttgaaagtaattgtaataaaaggaaaaattgaaaatgggatttaattaaacgaaagagtttttgtatagtaaaagaaattattaatagagtaaatagataatttatagaatgggagaaaatttttgtaaattatgtatttgataaagggtttatatttagtatttataaggaatttaaataaatttattttaaaaaagtaaataattttattaaaaagtggataaaggatatgaatagatattttttaaaagaagatatatatgtggttaataaatatattttaaaaagttaaatattattgattattagagaaacgtatattaaaattataatgatattgtgttattgtattttagtttgggtaataagagcgaaattttattttaaaataaataaataaaaatttataataagatattattttacgttagttagaatagttattattaaaaagttaaaaaataaaagatgttggcgaggttgtggagaaaaaagaatgtttatatattgttggtgggagtataaattagtttagttattgtggaagatattgtggtgattttttaaagatttaaagatagatattatttgatttagtaattttattattgggtatatatttaaaggaatataaattattttgttataaaagtatatggacgtggttaggtacggtggtttatgtttgtaattttattattttgggaggttgaggtaggtggattatttgaggttaggagttcgagattaggttgattaatatggagaaatttttgtttttattaaaaatataagattatatgggcgtggcgttatatgtttgtaattttagttattggggtggttgaggtaggagaatcgtttgatttcgggaggtagaggttgtagtgagttgagatcgtattattgtattttagtttcggtaataagagtaaaattttattttaaaaaaaaaaaaaaatgtatgtatgtgtttattgtagtggtatttataatagtaaagatatggaattaatttaaatgtttattagcgatagattggataaagaaaatgtggtatatatatattatggattattatgtagttatataaaaagaataatattatgttttttgtagggatatggatggagttggaggttattatttttagtaaattaatgtaggaatagaaaattaaatatcgtatgttttcgtttataagtagaagttaaatgatgagaatatagggatatatagaggggaataatatttattggggtttattagagggtggagggtgggaggagggagaggattaggaaaaataattaatgggtattaggtttaatagttgggtgacgaaataatttgtataaaaaaatttttatgatatatatttatttatgtaataaatttgtatatgaattttcgaatttaaaataaaagttaaaaaaagaaaagttatggttgtagtatagtaaaagttttagcggttgatataatgttaataagataataaaattagaagaaaagacgggaatgcgaaaaaagataagatttttttatgggttttgtgttgggtggataatagttgtatttattgggaggataataattgtatttattttagtatattttttggataatatgaattatttaatgttgataacgttatgtaggggtaggaagttgtaggggtttttatttttttttttttttaagaatagtttttacggagtgtttgcgattgtaggtacgcgtcgttacgtttgattggttttcgtattttttttggtggagatggggtttcgttgtgttggcggggtcggtttttagtttttaatcgcgagtgattcgttagtttcggtttttcgaggtgtcgggattgtagacgggagtttcgtttatttagtgtttaatggtgtttaggttggagtgtagtggcgtgatttcggttcgttataatttttattttttagtcgtttgttttggttttttaaaatgtcgagattgtagtttttgttcggtcgttatttcgtttgggaagtgaggagcgttttcgtttggtcgtttatcgtttgggatgtgaggagtttttttgtttggttgtttagtttggaaagtgaggagcgttttagttcggtcgttattttatttaggaagtgaggaatatttttttttggtcgttattatatttaggaagtgaagagcgtttttgttcggttatttatcgtttgagatgtggggatcgtttttgtttcgtcgtttcgtttgggatgtgaggagcgtttttgtttagtcgcgatttcgtttgggaggtgaggagcgtttttgttcggtcgtttcgtttgagaagtgaggagattttttgtttggtaatcgtttcgtttgagaagtgaggagttttttcgttcggtagtcgtttcgtttgagaagtgaggagttttttcgttcggtagttatttcgtttgggaagtgaggagttttttcgttcggtagttaattcgttcgggagggaggtgggggggttagtttttcgttcggttagttgtttcgttcgggaggtgaggggcgtttttgattggtcgttattattgggaagtgaggagtttttttgttaggttattatttcgtttgggaggtgtatttaatagtttattgagaatgggttatgatgacgatggcggttttgtggaatagaaaggggggaaaggtggggaaaagattgagaaatcggatggttgttgtgtttgtgtagaaagaagtatatatgggagattttttattttgttttgtattaagaaaaatttttttgttttgggattttgttgatttgtgattttatttttaattttgtgttttttgaaacgagtgttgtgtttatttagggttaaatggattaagggcggtgtaagatgtgttttgttaaatagatgtttgaaggtagtatgttcgttaagagttattattattttttaattttaagtatttagggatataaatattgcggaaggttttagggttttttgtttaggaaaattagagatttttgtttatttgtttatttgttgattttttttttattattgttttatgattttgttaaatttttttttgcgagaaatatttaagaatgattaataaaaaataaataaataaataaataaaaagaaagaagaaaaagaaaaaaaaaaaaaaaaatagtttttattatatgtattttcgatttgaatttttttattgaagtttgttaagttttttttaatagaatatttgtgtttaaaatgttttttggaataagaaaaataaatattatatatggggtaggggagtttttttaatatttagatgtattaaagttttttttatttagatcgtttgtttttataattagtgatggtagattattgattagggtgtatttatggatttttatgaattaaagtatattttgttttagtatttattaaggaaatagttttttttttatttttttgagaggaatagtaaatggtgagtttaatatggggtttttggttatttgtaacgtggggttgattttggttttattgttaattttgggtttagtatggaatttttttttgataggttggagtattagaatgaggggttgagttattttttttttttgttagaggggtagaaatgaagggataaaatagttttttagtttgtatttttttttataaggttattaatatagtattttttatattttttatattttaatattttttatatattttttttttagaatttttttgtttttaataagttatgttatatttgtttgtttttgattttagttggtcgtttttttttatttttttttttttttttgtggagtattattttttttttttgttagtttttgtcgggttataaagtatatttcgtttttagtttttttagtagtttttaaatttgtgatggttttttttacgttatatatatttttttttttttttttttaagacgaagtttcgttgttgttgtttaggttggagtgtaatggtacgatttcggtttattgtaattttcgttttttacgtttaagttatttttttgttttagttttttaagtagttgggattataggcgtttgttattatgttcggttaattttgtatttttagtagagaaggaattttattatgttgattaggttggttttgaatttttgattttaggtgatttatttatttcggttttttaaagtgttgggattataggtatgagttatcgtgtttagttttttttttttttttttttttttttttttgagacggggttttattttgttgtttaggttggagtgtagtgttttaattttagttgattgtaatttttgttttttgagtttaagtaatttttttattttagttttttaagtagttggggttataggtatattatttagttaatttttgtatttttagtagagatggggttttattatattgtttaggttggtttcgaattttcgattttaagtaattcgtttgtttcggttttttaaattgttggaattataggtgtgagtttttgtgtttggtttttttatattatatattttttgttttatttataggatttaataatatgagttaagggttgtgttatttttttggtgtattttttagtaatttattttttatttttgtaggaaaaaattgttttaagttttgtgagaatttaaatatagatgatttgatttatttttaatttttggagaagtttttgggttttttttgttgattgttaggaggttatttttttcggtaaattttttttattaggttaagttttttttatagttagaatgagttagtttataagttatgatttttttgcgtttgttttgttttagtaaagatgtttttgtagggttgtatgggtggtgatgttatttattttttttgttttttttgttaaggaaatattattagtttttgtgttttataattagattatttaagtagttagggattttttcggtagttgtttaaaggtttttgtaatttttaagagttttgtagcggtaggttttttgatagtgagagttttttgtattagttgattttcgttttgttgttaatgttaggttttatttttttttgtatgagatagcgagtttgttaatgatttttatttttttttatatttgtgatttttatgttattagtttttttttttataataattttagggattttaagtttttatatttcggttgggtttttttatgagagttttgatttttggttatttttatatttttcgttttaggtggataaatttatatgttaatattttaatttttgttttttggtttttaattttgtttgttaagttggatgtgaggagagatatggagaggtatacgtttttttttagttgtaattttttttttagatatttaattttggtttttgttgttagtcggatttttattgttaaaagaagtatttaattttttgtagtggttattggtcgatttttcgtattttagtgtattatgcggtttttagttaataattgttttaggttatttggtatttttaaggtatttttgtatttatatagaggtatataggtatcgaatagttgtgttatttaattttatatagacgtggttgtcgttttggggtttttttatagatgttttattttttttatttattttttgtttttttagttattggttgggggattattaaatgttttattatgaataggtttatataaatttatttttaaattttgaggggaaaagagattaaagaaagagattgataaatttagttttttatagagaaatatttaatggagttttttaaagagaagtgatgtttgaggtggttataagatggtggatttttatattttttttttaaaaaatattttttttagagtaagtttttaggggaaaatatgtgtaattggttatattatagatttttttgttgaaatttatgattgttggggaggttagataagtatttttgtgagaggttaattacgttataggtattgttttaaagtttttgatatagaatattttggtatgtaggagttagatattggatatttggcgaggtgtagtggtttatatttgtaattttagtattttgggaggttaaggtaggaggagtttaaggaggttaggagtttaagattagtttgtgtaatagagtgaggttttgtttttataaaaaattttaaaaattagttaggtatggtggtatacgaaattgtagttttagttatttaggaggttgaggtaggaggattgtttgagtttaggaattgaaggttgtaatgagttatgattgtattattgtaaaattttatttaaaaaaaaaatggttattgtggtggttttattttaagatggtattatttttattatgtaataggttgtttttttatagtcgtattggtaagatttaattttttggtttgttgatattggagaaatttaataagtggtggaagatggagtagtttttattgttgtgagttggggtgaatttattaatagattgttaattttttgttgagggttttgttttaagtaggagttttttattattttgtgggtttaaagtaatttagtttttaaagtagtttttttttgttttttaagatttggaggatttttttttttggatttatgaaagggatacgtgtagtttttttgggcggggatttatgagaatttcgggtttttgtaagagttttttggaagattcgattttagtaggttagaaagttttttttttgggaaattagggagtatttagggagatgagtgttattagtttttttattttgatgggtagttaggtttggagtatatggaaatgttttgggaatttcgattttaagtgaatatgcgtattttttttttttttttttttttatatatagagtaggtagttgtaacgtttttattttattttgtttttggttttttatgtattataatttaatttttgtgtattataggttttacgtaggagtttatagtatgttggtattcgttttttttttttattttttttaagttaattttttagttaatcggggtgttttagagatatagggattttgtttggggtaaaaaggattagaaaatgtagatatatagataagaatgaggtttttggattttattgtggagattttgaatgttagatggagtttagtatggaggtttttttttataattgagtttattttagagttagatatttatttcggggtacgtatagtttttttttgtcgtgtgtgttagatgagatgtatttattttttagttaaatgagtaatatagtattttttttttagtgtttggtaaaggtaagaaaggtgaggaatattttttttaagatttttaggattttaaataaagttgggaggggttttttgggatgaatgaaaggaaattaggttttgggtgtttaggtttttttttttttgaagaatgcggtatttgttttcggggttgtttagggttcgttgtttttttcgtttatttttatggttatcgaggatattggttttttttagaattagttaggattttatttgggtttgtggggggttttatgattttttttagggtttggattaaggttatggttgaggttatgagggtggtagatagttgtgttaaaggtgttttttagggataggttgtttttttaaaaaaagaagagttaatagttttagaattgtatttttgttttttacgtttttattacgtacgttttttggaatttttttttatttttaattatattttttatttagtttttttttttttagttttttttgtggtttttttttttcgtaggttagtagttttttttgtattgatttattatgtttttgtgttatttttttttgatttttttttttttttatttatttttgatttgagattttttttatttatatttatttttttgtgtttttgttgtttttttttttaggtatttttttatatattaggtatttattatatagaagaagagtttagtaaagagttttacggtcgttataatcgagattagggtgatgaggaagattttttacggtattagggatttattaggtttcgttttatttattgtagtagatgtattatgggaagttgtgtgtattttagttagagttgttgttttagagtttgtagaggttatattggatttagagttggtggttgtgttggttttattggaggttgtgttggatttagaattggtggtagtgttggttttattggatattgtgttggatttagagttggtggttgtgttggttttattggaggtcgtgttggatttagaggtggtggttgtgttggttttattggatattgtgttggatttagagttggtggttgtgttggttttattggaggtcgtgttggatttagagttggtggttgtgttggttttattggaggttgtgttggatttagagttggtggttgtgttggttttattggaggtcgtgttggatttagagttggtggttgtgttggttttattggaggttgtgttggagttagagttggtggttgtgttggttttattggaggtcgtattggatttagagttggtggttgtgttggttttattggagggtgtgttggatttagaattggtgattgtgttgattttattggatattgtgttggatttagagttggtggttgtgtcggttttattggagtcgtgttggatttagagttggtggttgtgtcggttttattggaggtgtgttggatttagagttggtggttgtgttggttttattggaggtcgtgttggatttagagttggtggttgtgttagttttattggaggtcgttttggatttagagttggtggttgtgttggttttattggaggttgtgttggatttagagttggtggtagtgttggttttattggatattgtgttggatttagagttggtggttgtgttggttttattggaggttgtgttggatttagagttggtggttgtgttggttttattggaggttgtgttggagttagagttggtggttgtgttagttttattggaggttgtgttggagttagagttggtggttgtgttggttttattggagggtgtgttggatttagagttggtggttgtgttggttttattggaggttgtgttggatttagagttggtggttatgttgattttattggatattgtgttgaatttagagttggtggttgtgttgattttattggaggttgtatggaatttagagttggtgattatgttgattttattggaggttacgttggattttgagatggtggttgtgttgattttattggaggttatattggatttagagttggtggttgtgttggttttattggagattatattggatttagtgttggtagaggtgttagttttattggaatttgttgttgaagaaattatataatgataaatatatattgtgtgtatatattttttgtttattgtttggttaaatttattatataattttatttaatgtttattatggtgttataatatagatgttattattattattagttgagatgaagaaattgaggttttaaaatgttgatattgggttgggtacggtggtttacgtttgtaattttagtattttgggaggttaaggtgggcggattatttgaggttgggagttcgagattagtttgattaatatggagaaattttatttttattaaaaatataaaattagtcgggtattaattttagttattcgggaggttgaggtaggagaattatttgaattcgggaggtagaggttgcggtgagtcgagatcgagttattgtattttagtttgggtgttaagagtaaaatttcgttttaaaaataaaaaataaaaaaaagttgatattggtttaagtttatatagttagtgagtggtggaataggaaattgaatttaggttattaaatttgtatttgtggagattaagttaagttaattatttatttataatgttagagttatattatttagttttattggtagttaatttttttttatattttgttatgtaagatataatatagatataaagtattataaaagaattataggattaggtgaaattagtatatattgattaattttttttttaagtagtattgttttttttttggaaaatattttttagaataatatttagaatatatttattttagaattatttaagggagtatgttgaaaatatttttaagtaaattattttagattaaatgaattagaatttgagatggggtttaggagtttgtatgtataataagaagttaggtgattatatgtatttaagttttaggggtttttgattattatggttaaggttagagaagaacgagttatatgtagtttaaatatataagagtttttaggaataagggttgtaaattaacgtttaaaggtagagggaaggtttttaattttttggaggtttggttggagttaaggttatgttaaatttttgtttttgattttttagaaggatgaagatatttaatttttttagtttgtacgtgggaagttgacgaggaattaggtgtaggggtaggagagaaattgagtttgtagaatatagaagagtggtattttattttattttattttattttattttattttattttattgtttatttatttatttgtttttgagacggagttttgttttgtcgtttaggttggagtatagtggagtaattttagtttattgtaatattcgttttttacgtttaagcgatttttttgttttagttttttgagtagttaggattataggtataagttatttcgttaggttaatttttgtatttttagtagagatggagttttattatgttggttaggttggtttgaaatttttggttttaagatatttattcgttttggttttttaaagtgttgagattataggcgtgagttattgagtttggttttattttattattttatttttttgagatagagttttatttcgttatttaggttggagtgtagtggtattattttggtttattgtaattttcgtttttcgggtttaagcgatttttttgttttagttttttgagtagttgggagtatagggataagttaatatatttagttaatttttgtatttttagtagagatagggttttgttacgttagttaggttggttttgaatttttgattttaatgatttgtttgttttatttttttaaagtgttgggattaaaggtatgagttatcgtatttcgttagaagagtgatattttaaaagtagtcgattttttttgtttttaatatttaaaattttaattatattatataggttgttattattttatagatgtagaaatcgaggcgtagagaagtaattgatttaaagtatatagttaatagatggagttataatttaaatgtaggtaatgtgagattagagtttaattttaattattgtgtttgattgttttttgtatgatatattttgttaggttgaagtgattcgagtaaaatgatgatttttattttatggaagagaagtagagttggttttagtagtggttatattttttttttaattttttaaaggtttttagattattcgattttaaataaaattatttattagtttttaaatgtaatagtagattaaatataaggagaatattttttttttgtatttttatttgtttttttgtggttggaaagtaagatgtttgggttttagatgtattaagattttagagggtaaagaatagaggatttttgagaaaggggatttgaaggtgaagagataaaggttggtgtttttaggagcgtgggttttttacgtttgtgtttttgggaagaattttggatttaggcgtgggtagttggatgtttgggttttttaggttttttttaggtaatgtagttgtttttttttttgttgtgaaagagttgtaggggtttttatagttttatatggtttgaggaggggtggggtagttgatttgatagtttgttaattataggtaggtgagagaacgatattaagtttgggacggaatagagtaggggttaagaggaaggtgagaaaggagaatgatatgattatattaggtagggtgtttggttgggttgtagtaggaagtagaatgggatgaggagattatggttgttagagtggaagggatttattttttgaagtagggatcgggttagaaatttgttgtagtttaagaatttgttttttggttaggaagttttgtgggtttgttttagtatgaaagaagttttaatgaattgagttaagagagtaggattttatatttttatagtaaatagtaataggtgacgtaaaagagattagtaattaggattttgggtttttgggttatgggtagaagataaatggagtattattgagtatgtagtaagtatttaataatgtatattgaaggaataggggaagagagatttagaagatataatgaagagagataatgaaaatatgtttggggtttttggggtatgagaattgagggtgtgggagagtattgaatacgttttttgttagatttatagtaggagaaggaaggtagggtttttttttgatttttaattataggagtttttttttgttttgtttttgtttttagacggttgtataggagtttttttattttgagatttttttgatgtgttttagtattagttttaaggaagcgttttttaggagagtatatattttagggagagatatagtgttatatcgggatatagtttgatgggaggagggagattaatagtttaagttttggaggaggtttgaatttggtttggatatttgggtatggttagtagaggggaaatagttagttaaaagagcgtgattgaagagatttaaatgagtagagggtttggggaggtttgagatggtatttgtgattaggttgatggggttttaatatatagtttgtattttttgttatagtttattggtgttgttataaaggaatttttgattgtgggtgatatagagaaaagaggtttatttgttttacggttttgtaggttgtatgagaagtatggtattaacgtttgtattggtgagggttttaaaaagtttttattcgtggtcgaaggagaaggggagtcggtttgtatagattatatagcgagagagaggaagttggaaagaaggaatggaggaggtgataggatttttttaataattagtttttgtgggaattaagagtgagaatttattggttgagaatggtatcgagttgtttatgagggatttgttttaattatttaaattttttttattaggttttatttttaatattgggaattaaattttaatatgagatttggtagggtttaataattatatttaaattattgtaatgattaaagtgagttgtttgtattttttttaataatgacgagaagttttttggaagatatagttttttagatagtttatttgtaggcgaacgagtttttttgatatgtaagttttgttagaaggaagttggtaagtaggaggtggttgaagatatgaaggagttttgaatgagtgagttggagaaatagaaagggttagcggtgtgttgggaaaggtttagaagtgagtttgtttagtggttgtgatgggaagttttagagggttaggtatgcgggaacgtttagtgataggttgggttttggatttttagtaatttttttgatgtgttagtattttgtagttgaaaagttaatagtattttaagaattttttttttttagaattatttagaaattgagattttggatttaagtttaaattttattttttagagggtattttgaaaattgtagcgcgtatatttattagagtttaatgtaattaatatttttattcgttattaaaataatataaagattttagaatattttaattcgtattatttattttttaaattatattttaatattattaagtattttaatttttttttgtttgttaattttatgaaagattattgtaaaaaaaaaattattgttgtttgtttatatatttttagtttgaacgtagttatatagttatgttaagttgtaagagaaattgagaaagattgtttttagttgggtagacgtgtgtttagttgatatttgagagatttgttgttaaaggtggagaatgggtgttagtagataattataaagtcgtgatatgatttagtaattttattgttgaggaggtagttaaaagaaaagaaattagtgtattaaagaaatattcgtattttaacgtttgttgtagtattgtttgtaatagttaagatttggaagtgtttattaatggatgaatgaataaagaaagtgtggtataggtcgggcgtagtggtttatatttataattttagtattttgggaggtcgaagtgggtggattataaggttaggaatttaagattagtttggttaatatggtaaaattttatttttattaaaaatataaaaattagtttagtgtggtgacgggcgtttgtaattttagttattcgagaagttgaggtaggagaattgtttgaatttgggagacggaggttgtagtgagttaagattgtgttattgtattttagtttgggcgatagagtgagattttattttaaaaaaaaaaaaaaaaaaagagttaggtacggttatgtttgtaattttagtattttgggaagtataggtgggtagattatgatgttaggagttcgagattagtttggttagtatggtgaaattttatttttattaaaaatataaaaattagtcgggcgtggtggtaggtatttgtaattttagttattcgggaggttgaggtagaagaattgtttgaatttgggaggtagcggttgtagtgaatttagatcgagttattgttcgtattttagtttggatgatagagtaagtttttatttcggaaaaaaaaaaaaaaaaaagaaaagaaaagaaaagaaaacgtggtatatatatatagtagagtattatttagttataaagaaagaatgagatttagttatttgtaataatatcgttggatatggagattattatgttaagtgaaaaattcggtatagaaagataaatattgtatgtttttatttatttgtgggatttaaaaattaaaaataattgaatttatggatatagagtttagaagaatggttattagaggttgggaaaggtagtggggaggattgggggaggtagagatggttaatgaatgaattaattaaatgaattaaattaatttaaaaaaataaatgaattaaaaagaatgaataagatttattttttgatagtataatagggtaattatagtgaataataatttaattgtatatattaaaataatataaagagtgtaattggattttttgtaatttaaaggataaatgtttgaggggatagatattttattttttacgatgtgttgattttatattgtatatttgtattaaaatattttatgtattttataaatatatatatttattatgtattataaaaagtaaaaataaaaaaaattaaaaataaagttaggacgtatatttaaatttatttattttatattttgtatttaataattttaatatttaaagtttttgaggatttgatattgttgtttagttttttggttttgtttttttttttgttggtttttatttagggtgtttgtttttatttatgatttgagaattatgattataaatttattttttttggaatgttatttgtcgagattaaggttgtagtggtattagtataatttattgtagttttgattttttgggtttaggtaattttattgtttcggttttttaaatttttggaattatagattaagttacgattttttatagagaatttgtatgttttttttaagtatatggagatattattatttgaggattattttattattatatttttaattaaaatattttattaatattgttattgtatatatttatggggtataatttaatgttttaatatatatatatgttgtataatttgatgattattttaagttaaattataggattgcggttttttgaattatttagattgtatgatttgtggttataaattatgtaagtaaggtattgttggttgttgtggttataatttattttttaagggatattttttttatttttttttgtattaaatttagagataggtaattttgtttatatttttttagaggaggggtaggtttatttttagtttatatttttattgaaagttatagatttatgtgatttttttttatttatgattttgggttgatttagttgaagttgtaatattcgaagtttaagttttttgggttttgtaaaagttggttttagtattttttttattttttgggttttatttagtttttaattttagtattttatatttttatgttaatttattgatttttttaagaagattttgaagtttataatttagttttatagtgtatttttagttagggtacgtagtttattatatagtaagaagtttaagttgttattggattgttttgagaaataaatggtgatgtatttataggtattagtatagtgtttggtatttaataagtatgtaataataaaggataaagggaaaataaaaaagataaatataaatatataaatatatagatgttaggtgtattttgagattttaatttgtagtattgttttagtaaattttttttaatttattatatagtatttgaaagaggtaaagaagtagggagggagattttttttaaagatgaagaattggagggtattgagtgagtttaataggattttttgatttatttagtttgtagagtttgaagttataaatttaaataaagaaagttgtgtaattataaatttttaggggaaattttttatttattttattattataaattgtgataattttatttttttttttattggttaggttttattttgaggaaacgatagaaagttaaagtttaaagagttttgatttgtgtgttgagagattaaagagaaattgttttgagtttgattatcgtgattttttttttttataagagttggaattatggttatgtttaggggatatttttatttgagtttatatttaaagttggtgaggttgtaggttttttttagaattattttttatttttttgattgtttcgttggttaaattttttgtgtttttttttttggttttttttttgattttgattatgattatttttatggttaattttttggagattttagagaagtttattttgatttattttatggttattatttttttttttatgatttttttttttttttaagatttttttttttatagtattttttattatttagtttatgtttatatttttttttgttttggcgattttttttgtgatgtattttatgattattgttgtagttttttttaagtttataacgtttattatgatttattttatagttatttttatggttgtggtttagtttatggtttattttatgtttaaagttatgtgtttttgtgtgttttattttaagtttttttttatgaatgagtgtattttttaggttgtggaatgttttagagtttaggattgagtttaggtataaattaaggttaaggttgttgttatggaggttataaatgtttttatttgttagggtaaagaaagatttttttaaaagagaaaaatatatatattagtagttaatttttttttttttttattattaaattttggattattaaaatttataaatttttattttttaatattgtttatttttttattaagtttttttgtgtgtgtgtgtgtgtggatgatatttaggatttttttttttttatttatttatttattggagaaaatagtttttttaattagtatatttgtattttggtagggatttatgttgtttaatttttaagataagataagtttgggtatggtggttcgtgtttgtaattttaaaatttttggaggttgaggtaggtggattgtttgagtttaggtattttagagattagtttgggtaatatggtgaaattttatttttataaaaataaaaaaaataagataaggtaaatttgtattttgtatttgggaatagagttagttaagagtagggaattttttattgtgtaaattaattaaaaaggttgtatgtttatgaggttaggtaaaaataaataaaagtttataaggttaggtatagtggtttatgttagtaattttagtattttgggaggttaaagcgagaggattatttgaatttagttttatttttgggtagatagaagttgtagtgagttaagacggtattattggattttagtttgggtgatagagtgagattttatttaaaaattaaaatgaaaaattttttttaaagtttataaaatagaagttagaatagtgtttatttttgatggagtgggtattatttgggaagggttataaaataaattatttagatggtagaaatattttatattttaagttgggtaatggttgtataagtgttaatatattttgaaattaattaagttgtataaataatatttgtgtatttttgtaaattatagtttaaaatttttttatttgtgaatagtatttattttttttaattaatattgttttttttattttttttttattttttgagatagagtttttttttgttatttaggttggagtgtagtagtacgatttcggtttattgtaatttttgttttttaggtttaagtaatttttttgttttattttttagaatagttgggattatatgtataagttattatattcgattaatttttgtatttttagtagagatagggtttttttatgttggttaggttggttttgaattttttattttagatgatttattcgttttagttttttaaagtgttgaggttatagaattgcgttcggttgttttttttatttttaagtgtaatttaatttttaattttttttttaattgtattaagttgatacgtgaaatatatatttggatttttgtatattttttggtatgtagtttttaaaatttttaggtattgaaaagtgatttttttttttgtatgcgaatgagttaattgttggttataggatgggggttaattatcggaaagattaaagtattattttttaatttttaatttttagggaggagaggggattgaaggttaagttgattattagtggttatggtttaattaggtatatttatataatgaagtttttgtaaaaattttaaaggttagggtttagaaaatatatggaggtttttggaggatggagtgttggggagggtatggaagttttttgttttttttttttttacgtttttttatttgtattttttgtaatattttttgtaataaattagtaaaggtgtttttttgagtttagttagttatttttgtaaattaatcgaaattaaataggagtagttaattttaatttgttttagttggttagaagttttagaggtttggatttggtagtttgtgggaaggagcggttggtgttgagggattgcgcgtttagtttgtggatttgatgttatttttaggtaggtagtgttagtattgaatcggaggatatcgagttggtgtttgttgtagaattgattgtttgtttagtgtgggaagaatttttttttttaatttggttattagaagtgttttgtgttggtggtggtgtgagagtagaggaaatatagtttgtgttttttttatttttaaagttggtgaataaatattgtatatatttatggtgtataatgtgatgttttgatatatgtatatattttgaaattattaaattaaattaatatatttattgttttgtatatttattattttttattggtaagaattatattttaatttttaaagataaagaaaaataagagataggttataaagagttaaaggttggagaattatttaaaaaatattgtgggttaggtgcggtggtttacgtttgtaattttagtattttgggaggtcgatgtggatagatgatgaggttaggagttcgagagtagtttggttaatatggtgatattttatttttattaaaaatataaaaaattagtcgggtatggtggtatatgtttgtaattttagttatttaggaggttgaggtaggagaattgtttgaattcgggaggtggaggttgtagtgagtcgagattgtgttattgtattttagtttgggtaatagggtgaggtttcggtttaaaaaaataaataaatattttggttaagaatataggttttgttgttaagcggattagaattagagtttagttttgcgtggttttgttttgtggtttttagtaagttatttatgtttttgtttttagttttttagtttataaaatgggataataggagtacgtatttttaagggtggttgagtagagtaaaggagagatgatgttttttaagtattttgggttttggattttatatttagtagatagttaataaaatgttagttaattaatattatatttttattttaaatatttagggggttgtttatggttggtgagttatatattgttttttttttagggaggggttagagattttgaaataagaaatttaggtaagttgattgtaaattatgttaattgtttgtggtttgtgtgaattttttatttatgtattgtgtatttattttggttttttttataaatttataagattgtatataggaatatataaagttaaaatgggaaaatataaatgttttattttttaaaatagaataagagaaatatatttgaatagaagattaagattaggatggataatagaatatagtttgttgttggttagtggttgttatattggtattaagaattgcggagggttggggtttttggaacgttaaatttttttttatattagggggagcgtttttatagtttttattttttagaagggtatttttttgttaattttttttagtgttttatgaagttttgaaatttttagtttatttgagttgtgttaagaggtatttagaaaagtgaatttgtttttatttgggtaaaattataaaggtatgaggtgggatatgttttatttttattttggaaggagtttatgattttgtttgttttgaaagtgaaaaatttgttgaggatttaaatgtttattattttttaaagatgttttttttagtgttatatttttagttattttataagatatattttttattatatttttaatgtttttttatttatatttagatattttttttttatttggggttttttttttttttttttttttgagatggagttttatttttatagtttaggttggagtgtagtggcgcgatttcggtttattgtaatttttgtttttcgggtttaagaagtttttttgttttagtttttcgagtagttgggattataggtgtttattattatatcggttaatttttgtatttttagtagagatggagttttattattttggttaggtttttttcgaatttttgattttaagtgatttttttgttttggttttttaaagtgttgggattataggtgtgagttattacgttcggtttttttttttttttttttttttttttttttttttgttatatttatcgtttatattttttgtttttttttttttttttggtttttatattatattatgtgagatagtaaaaattagattgcgaaagtagtagtcggtcgttgtttattaggaggtagatgtataatagtataggtggttagttgtgaggggtattgagaggaatatttttttttagggcgtattgtagttgtgaagtattatagtttttatttatttttagtgatttatttatttgtagtgatttagttaatgaaaaattttattttttaaaatcgtagattattataaatttgttgtttgattttaaattagtgagaaggaaatattttatttttgtttggaaattttaagtgattttgatatagagaagtagtttttaattttaattggggtatagataaggggtttttttgaatataatattttacgtttattttaattgtagtttttaaggaaataatttattttatagttttaagttgtcggtgatttttttataaatagttttgtttttttttgagttttttaaaatttttttatttaaattttattaaaaatttatatttttttttaatattataatgatattttttttaatattataatgatattttttttaatattgtaatgatattttcgttgtttggtgagaagttttttagttttttggtatatagttttttattttgtaattaattgataaatttgattttatgggattatatatttgtttttgtatttttggtcgattggattagggtataagtgattttttagatttttttttatgttaatagtttagtggtttttttttcgttaattttaatttttttcgtgatttatttttttaggaaagttttgtttatttttatgtttagttatttataggtaaaattttagttttattgataatttaatattaattatgattatagttagggaaatgagtatgatggtttggggttgtaaatgtttatttagtttgattatatgtttggatgtgtggtttacgttaattgtatttgtgtttgtggatattgggtttgtttattgggaggtgttgttggttggtttacgggtggattttgtagtggttttgaagttgggggttgaggtggtagatgatgtttttatagtggatgtatttaggttagaggtgtttgagattattttcgttataggatggttgtagtagaggttatggagtttattttaggggttatggtgatagagttaggggcggtaggattggttttaggggttatataatatgatgtatttatagtagagataattaaaggggagtgggagcgtttagagtagagcggggtgaatttaatatgtttatggtgagaatagtttaggagaggggtggtgggggaggagagatggtagaaagttatttttttgtggtcgtgtttttataatagaggtgggtgtcgtatagaggaggaggtagaatgtgttatttggtggagttggtgatggaggaggtagaaggttgaggaaacgtgatcgtgatgggtatggaagtggaagatttatttgatttcggaagtggttatttaaatagaagagggcgggtttgtatataaagtggtaggttttgttttttttgtgattgtgattattgggtgtaaggagggagttggaggaggagatgatagaattggatttatttatgggtatgttagtggtcgtggttgggacggaggtgatattatttattatattgtggtggttagtaaaggtggggtgagtgtgtttgggtagatgtgggaggatttgatttaagtggagaaggttgtttatagggataggagagggtgggtttagataggtgcgagtgagaattaatatagtagaggtagtggtggtggttttgatagtaatgggtgtgtttaggttagaagtggtgaaaataggattttaaatagtattagttattagaatagaggtgagggtgtttagaacgaagaggatagaattagatgtaatcggtttgttgatggaaagtgttagagaatgaatataattgtttggttttagattggagtaaggtgatatgatttggatttgtgtttttgtttaaattttatgttaaattgtaatttttaatgttggaagaggggtgtattagttagggttttttatagcgatagaattgatggaatatatataaagcggagtttattaaatattaatttatatgattataaggttttataataggtcgtttgtaggttgaggagaaaggagagttagttcgagttttaaaattgaggaagtatttagtacgggaggaagatgtaggttgggaggttgggttagtttttttttttatatttttttgtttgtttaaattttagttattttggtagttgattagattgtgttatttagattaagggtgggtttgtttttttgaggttattgatttaaatgtttattttttttggtaatattttcgtagatatatttacgattaatattttgtgttttttaatttaattaggttgatatttagtattaattattataagtttattttttgttaatttgaatttatgcgtattttttgagattatatataatttttaaataaagataataataaggttataattatgtttaatataatataattattttttatataatcggaaacgtattaatttttagtttatatgttattacgtaaagttaataatatttaaatgttgatgtgaagttaataaattttatattatataataaaggagaaaggaaataaaatgaagatatttttttagtataagtgtatatatgtataaacgtgtttttaataaaagaaggaggaaatatttatgataattatagtgttttttttgtagttggttacgtagttatagttggtattgatggttatttttttttgttatttattttgtattttttttttttttagtaagtattttagtaggttatggtttttttttggtggagtgatttaaatttttatttttgaagggtttgggttatttgtagttttgtttggattgggttgttgtagttttttattgattttaattatagggtatggtaatgttaagagacgttttaatggattttaagtattttatgtatatttttttttattttcgttgtggagtagtagattgattttattaggatagtttaggttagttatagtagttaatattgtaatttttttttaagtttgttaacgtaaaggtagaaggagtttaaagtgtttaggtggtaattttaatttttagtttaatggtattgttgttgtgttttttggtggtagcgtttttttttttggagttaagatttttaggttagtagaatgtaatgttataggaataggaagtaaaaattttgttagtggattattaggggtgatggtgagtggtgttatttttatttttattttttgttttttggatttaggaatgttggttatgggagaaatagtattatataatggatattgatttagagtatatatagttttttagagaattttgttttagttttgtaaagtattgttatttagttgatgtcgtaattgtgattttaaaaggttattttatcgttttattaatttagttgttttaggataatggggaatataagattagtaaattttatgagtatgagtttattgttatttttttttagttgtaaagtgaatgttttggttagaggtaatgttgtgtggaattatgatggtggataaggtattttgtgattttacgatggtagttttggtagaagtattgtatgtaggataggtaaatttatattaggagtaagtgtttattttagtgaggataaatttttgttttttgtatgatgaaagaagtttagttagtaatttagtaattagttggttgattattttgaggaatggtgttatattgagggtttagtgttggtttttgttgttggtaaattgggtatttagtagtggttatagttaggttagttttggtgaatggaagtttatgttgttgagtttatttataatttttatttttgatattacggttattttgtttatgggtttattgggtgatgatagggttggttggggaaagaggttgaatggtatttatagaacgggttatcgtatttatttgattattaaaatttttttttgttgaggttatttgttggtgagtatttatatgagatataaatatttttatagtttttgattatttagagaggtttatttatataatttttttttatatttttttgttattaattttttaatcgtgttttttttaagtttttgattatttagttaaattttttattgattatgtattagtaaataattatatatttgatcgttttttttttatgtaaagtgtagaattaagtgtattgtttgaagttttgtttattgagaatatttttttttatcgttgttttttagggatgttttagagaggggttgtagtgttgtaattgtttattttcggttagtgttttatattgtgtagaattatttgtgaattaggttttagttttttttttttttgttaattgattatagggaattttttatgaggttatcggtataagttggggaagagaaagtagggtggtaggagtggagattatgggtatttgagttatttttttatgtaatttatttgtgtttttaggaattgtttgagttcgattatgtgtatattatttatatttgatgatggaatgttgtcgtatatcgatttattttatagttagatggattagaaagtatttagtttatgataggtagtttaggttatatggtgatttgatgattgatagttaaatgtttagtttttattaaagtttagtaataggttaagagttgttttttaaaaggagagtagttatttgtagaagatggtagggatttgttttaaaattttagaggtttttgttgtgatttatttatgtgggtttgtcgaaggttttaaatagtatttttatttgttattgatattttaagtattattggatttgttgggttatatggtttaagtggtagagtagtttgtatagtagtttggacgtattgtagagtttttttttgttttggattttatttaaaattgttagtttttcgggtgatttaataaatgagttggagtaatatatttaaatgtggaatgtgttgtttttaaaatttaagtaagtttattaggcgttgtgttttttttttggttgtaggaggggttaaatgtagtaatttttttattttagaagggatattttgataggttttatattattggatttttagaaattttattgaggtagaagttttttgaattttagttagatttattttttattttttggtatataaatattttattaataagtttagtgtgtttgttattttttgtttattggatttaattagtataatattattaatgtaatggattagtatgatattttgtagaagtaaaaagtgattaagttttttttgaataagattatgatataaagtcggagagttgatatatttttgagataggatagtaaagttgtattgttggttttgttagcggaaggtaaattatttttggtgggtttatggataggaatggagaaaaaggtatttgttaagttaatggttgtatattaggtattaggagatgagttaatttgtttaagtaatgaaataatatcgggtatagtaattgtaattggaattattatttggttaggtttacgataatttattgtttttttttaagatttatttgttttttgtataggttaaatgggagaattgaatggggatatggtgggaattattatttttgtgttttttaagtttttgatggtggtattaattttcgtagttttttttgggatgtgatttttttttttatttattatttttttaggtagaggtagttttaatggtttttatttagttttttttattatagtaatttttattttattagttatggagttaatgtaggggttttgttagttgttaagtatatgttaattatgtattttggtattgaggaaatgattataggatgagtttagggatttacgggatttattataagttagatttgggttaaaattttattaattatttgatttttataaacgtttattttttttttttttttttttttttttgagacggagttttattttgttgtttaggttggagtgtagtggtagattttggtttattataatttttattttttaggtttaagttatttttttgttttagttttttaagtagttgggattataggcgtgtattattatacgtggttaatttttgtatttttagtagagagggttttattattttggttaggttggtttcgaatttttgatttcgtgatttatttgttttggttttttaaaatgttgggattataggtatgaattattattttcggatttataagtttatattttaattggagggttataatgatattttgggttttttggaattaacgttagtttagagttagtgtttagtagtttttaaaatgtttaattatttttttttttttaatatatagttattttggtaaaaggttagaggttttggggaaggatgggagaaagatttattgtataaattgttggtaatgtagtggggtttttttttaaggggattcggtttttcgtttatttaaggggatttgggtttgtgaattggtttaagtttggaaattggttgaggggtcgtgattttgtttttataatttaaattagttttttgtttatttagtttagaagttttttgtttgtataaattaaataggaatgtaataggttttttattaattttatttttaggaatattgtgattaattagttaatgttagagttttgtatgagttggattattttgattgttattttgtttttgttgtttattatggtatttatatttatattgttttcgatgtttgagtgttattatttggtttttgttatttttggatttaattatttttattgtatttaaattttgtagttgattgacggcggtttttattgttagatttgatatatagagaagagtaattatagggttttttagatatgtaggtgttgtttttataaatgtattttgtaaagtattattaagggtatattttttggatttttttagttgggatgagtaggtttaaattgattaatttattttattattttaatttttttaagtttttggatttttttatttatattaaattaagggagattagtttgtttatagtgggttattttttaatttatattttagttaattaagtaaataaattattagaattttttttaattttttaagttgtaatattaaatgtagagtttttatttagtggggttaaattaataaatttagtttgatttaattttatgttttttttattattattttatattttttatatttattttaatgtttgttttttagatttttgtttatataaattagaaaatttaagtagtttttttcgagtgtagtatatttttttatgggttatatttttaatttcgtttttaggggttttttaggaaatgatatttaatagtgtataggtttgatttgagatagggtagagatgatagaaataggtgaagagttagtggttgttattggaattaaaatgtgtgtgattagagaagatatgggggttagtatttgatataattgttttggtgatggtttgagtagaaatgttagtgattttgttgggtacgaaagtggtagagatagtggtggaggttgtagtggttttagaggttgtggtagaggttaagaagggcgatgaggttaaagcgaaggttgtggaggttatagatattgttgtggatggtatggtggttttagagtttgtggtggaagttatgttgtttttagattttgaagtgattttagaggttgtgtttatagttatgttgttcgtggatattgtagtggaggttgtggtggttttagagtttgtggaggaggcggttgtgggtatagatattattatggaggtattgggggttttagaatttgtgagggaagtcgtggaggttttagtggttgtagtggttttagattttgtagtggaggttgtggtggttttagagtttattatggataaaaattttgtagtgtttttagaggttattttggaggttgttgtgggtatagatattattgtggaggtagtgggggttttagaggttgatgtggttttaaaggttatagtggaggttaggatgtggtggatataaatattttgaaagaggatgtggtggatttagaggttgtggagaaggttttagtagttttagaggttgaggtgggagttatagtaggtatagaggttattatttaggttgtggggatttcggaatttttgttagaggttaatgtagttatagattgtagtggtttttgaggttatgatggaagttagagtgattttagagtttgtggtggttttaggcgttttgataaagattgtagtaggtatagatattattttggagagagtggtgtttttggaggttatggtagagtttatggtgggtatagatttggttacggagtttatagtattttgatagagtgtggtggaggttgtggtggatatagacgttgtagtggttttagtaggtattacggtggttgtggagaatttagattgtgtggttgttataggagttttggtggagattatagtagttttagaatttgtggttatggttgtggttatggttgtagttattttagtggtagaggtggaagttttggtggttttagagtttgtgttgtttttagaggttgtagcgaagattgtggtgggtatagatgatattgtgtggtgttcggtgtttttagagtttgtggtagaggttgtggtgggtatagatgttgtggtggttttagtaggtgttggaggggttgtagagggcgtagattttatagttgttttagaggtttttgtggagattgtagtggtcgtagagtttgtggtggaggttgtggggattttagagtttgcggtgattttagaggttgtggtgaagattgtggtgggtagagatgttatcgtagaggtcgtggcggttttggaagttgtggttatggttttagaggttgtgttgggagttgtggaaggtgtagatgttattatagagggtgtgttgtttttggggattgtggcggatatagatgttgtggtggtgttagtaggtgttttggtggttgtgtggggtatagattttgtagttattatagaggtttgagtggagattgtggtgttttcggaggttgtgatggtagtaatggtagttttagatatggtggttttataggttgttgtgtttttagagtttgaggtggaagttgtggtgggtataggtgttattgtggaagatgtggtggtgttagagatcgtggtgaaggttagggtggatttaagggttaggatagaggttgttattggtttagatattgtagtggagaatttgatggttttataagttgtggaggagattgggatggttgtagagtttatggtgattttagaggttgtgttggaggttgtgttggaggttgtggttgatatagatattgtagaggacgtgatgattttagaggtcgtgttgtttttagagtcggtggttgaggttatagtggtatagatgttgtggtggagggtgtggtaattttagaggttgtaataatagttgtggtggtttttgagtttatggaggttttagagtttatggtggagatggcgatgattttagaggttgaggtatttttagagtttgtggttgaggttattgtggatatagattttattatggttttaaaggttatagtgggttttgggggtatagttttttttgaaaaatattaatttttagttaaatacgatatttattttatatttttgatatttaattaggagtatcgtgtatatgttttttttgttttttttatattagtagaattgttggtgtcgttattttttatttggaattatgtattttagaggtttagtatttgtagtttttttcgtagttaagggttcggttgttgatttagttgtgtttttgtagtgtatgagttatttgatcgatttttttggtattttgttttttttgttataatgttttttggaattgtatttgtttaggtgaaataaaatttaatttatgttaaggaggttttatattatttttgtgtgtgttataatattaaggatagttgggttttattagattaggggaaagtgtgttgtttgaaaattttatttagggttaggtatagtggtttacgtttgtaattttaatattttgggaggttaaggcgggtagattatttgaggttgggagttcgagattagtttgattaatatggagaaatttcgtttttattaaaaatataaaattagttaggtgtggtggtgtatgtttgtaattttagttatttaggatgttgagggaagagaattgcgtgaatttaggaggtagaggttgtagtgagtcgagatcgtgttattgtattttagtttgggtaataagagtaaaattttgttttaaaaaaaaaaaaaaagaaagaaagaaagaaaattttatttaggttatttggattgattagaagaatttttttgtttgggtggaagtgataaggaggttataggagggtagtttgagtagagatattttggtgtaagttttttattattttttgggacgtttagtatacgatttttgtttgaagggagtttgtaggtttttatttattatttgagagtatcggggtgtaaaatttataggaggttagtttttttttagtttttttaggtggtgaaagttgatgagttaggtagtttgtaaagagatataaggagatattagggggaaaagtttttgggaagattttttttttttttttttttttttttttttttttttttttttttttttttttttttttttttttttttttttttttttttttttttttttttttttttttttttttttttttttttttttttttttttttaattttttttttttttttttatttttttttttttttttttttttttttttttttttttttttttttttttttttttttttttgttttttttatttttatttatttatttttttagtataatatattagattaagtggtagtattgggaatggattagagaagaatttgggggattagtttgggtttttttttgatatatattttttgtatttaggtttttttatttatttatttaaatatattttttaagaattttttgtgggttatatgatgtgttaggtatgggatatagtgattgaaaagttgatatagagtttatatttaaataagggagagagattatgaataagtaaatggatgatgttcgaaatgaaaaatttatgtatagttgattgggatttttttaggggttaaaaggaaaagttttttttgttttttatgtaggattatgtgtaggattaaaaaagaaatgagaggtttaaagtaaagaaatatttgtagattggttttttaaaatggaagtcgtattgtgatagtgtttttttgaatatggaaaagtagcgtttttgagtaaattgttataatgtttttttgtttttgttttgttttgttttgtttttttaaatggagttttattttttttgtttaggttggagtgtagtggtgtgatttcggtttattgtaattttcgttttttgggtttgagtgatttttttgttttagttttttgagtagttgggattataggtatacgttattacgttcggttaatttttatatttttagtagagatggttttattatgttagttatgaatttttgattttaagtgattcgtttattttagtttttcgaagtgttgggattataagcgtaagttatcgcgtttaatttagttgatataatgttgaaggaaatgtagaaattttagtttttgatggatttaaaaaatagtagtattgatatagtaattttagaggtattggagtaagttggaaagtttagagaaaatgtagatttagaaaaggttgtacggttatattaataaatagtaatgtatttaaaaatgtggaatgttttaataggtagttgaatagttaggaaaagttttaggattgttagtataaggatgtaggattgatgggatagtattttttatttataaagaaaaatatttataaggaaatagagttatttaattataagaaaatagtcgtttaagtattagtttttttatatagtaacgattgtgtagttgggaaagttgtgttaggagagttttagtatagtaggagttcgtgtaagtggtggttgagttgtgttagaatagtttttagaagggtttgtttagtaagattaagttatttattagaggttagtaattttttattttttaagtatataggtaacgattatgttaaatttagtttgagtttagtagtttcgggatagagaattaagaagaaattattagggatggttgtataattatatgaatgtatttaatgatattaaattttatttttataaatggttaaaatgatgtattgtaagttatgtatattttattatggttaagaaaataagaaggcggaggagaaagtagagagggagagagaagaggaagaggaggaagaattagaagaaaaaggaggaggagaagaggaggaggaagaagggaaaattagtagttattttggttaagtttggtggtattatttttgtagttgttgtttaggaagataaatatttgggattgtgtaagtattttgttatgtaaaaaggaaaggaaaaattttgatacggtattttatggatttggagtttgtttaagagtattttatattttattgtatttatggttttgaatgttaataaagtttttaaggttgggtatggtggtttatgtttataattttagaattttgggaggtcgaggtcggtggattatttgaggttaggagtttaagattagtttggttaatatggtgaaatttcgtttttattaaaaataaaaaaaattagttaggtgtggtggtgtatgtttgtaattttagttattcgggaggttgaggtagaagaattgtttgaatttgggaggtagaggttgtagtgagttaagatcgtattattgtattttagtttgggtaatagaataagatttcgttttaaaaaaataaaaaataaaaaataagattttaatttttagttattaattttttaaataatttatttgtgtttgttatttggaaagtattttttttttttttttataagagttttttaaaatataagtaggagttaatagtaaatgtattgttatatttttatatagtttgttttaaaatttatgagttaaattttagataaattatgttttaaataatagaaataatagatatggatattttttttcgagttatgtaatttagagaattttttttgtattttattttatgattattgttaaaatgaagtttattgatttttaaaaattagaattaaaaaatatttttagttttgttttgaaaagaaaatttatttttttatgatattggatattgttttaattattttggattgttatagtaaatattataaattgggtggtttaaataatggtaatttgtttttttatagttttgaaggttgggaagtttaaggttaaggtattggataatttggttttttgttagggtttttttttggattgtagatggttgtttttttgttgtgtttttatatagtgaagatagaaagaatttttttttttttttgataaggttatagttttattgaattcgggtattatttttatgattttattaattttaattattttttaaagattttatttttagatatagttatattgatgattaagattttaatatatgagtcgggtacggtggtttatgtttataattttagtattttgggaggttaaggtaggaggattatttgagtttaggggtttaagattagtttgggtaatatagtgagatatggtttttattaaaatttaaaataaaattaattagttgggtatggtggtagtttttgggaggggtgagtgttgagatgggaggttcgtttgagtttaggaggttaaggttgtagtaagttatgattgtgttattatattttagtttggatgatagagtaagtttttgttttaaaaaaaaaatagaaaaaagatttaaatatatttaggggggatattgtttagtttatagtagatatatttaaattagtaagtttttttagaggtgagattgggataggaagttattttgagatttataatattttttagtttaataaaagacgtaatttaaggttttattaaaaaaaatttatgaattgtaatataatatgggtatgatgtttaaatttgtatttgtaaatattgggataaaaagttaaaagttaaaagtcgttttttttggagaataggaattggatatgaaaagggggagggtgtattcgtgttagtttttgtaataaatttatggaattattggattttttaaattatttatatggattgttttggtaaaatttgtagagaaaatatatatatatagagagtaggagataaggatatgaagatagtgtttgtaggggattgttttaagaggtttggtgatgaaggggagttgatgggggtaaggttgagaagatgtgggtgggggtttgtgaagatggttgttagtagagtagagttttttaaagtgtgtttttggattatattaggagtgtttggggaatttgttaatttttttttttttttttttaatagagatagtgtttcgtaatgtcgtttaggtaggtttttgatttttagttttgggtaatttttttattttgttttttaaaagtgttgggattataggtttgaattattgtatttagtggttatttttattttatttatttattttttatttttttgagatagtattttattttgttatttaggttggggtgtattggtgtgattttagtttattgtaatttttgttttttaggtttaagtgatttttttgttttagttttttaagtagttgagattataggtgtgtattattatatttggttaagttttgtatttttagtagagacggggtttcgttatgttgtttaggttggttttaaatttttggcgtgattcgtttattttagttttttaaagtgttgggattatacgtatgagttatcgtgtcgggtttttagaaatttattttttaaaaatatttttttttgggtgttttttgtgtatattgtttagggtttatttggttggtgttgggaaggattttgtagaaggagaaggaaaaattggaaggggaagaagtttatgaagaaggtaggaggtgtgggatgggggagttagagttaagatgtacgaatattttaatgttagtaggggagaatggatgttgatgaaggcggttttttagatttgatggtgggaagacgaggtgggttttgatagtattttgtatatttgtgttttttttttattatatgttttttttgtgtgatttttgttttttttagtgaattgtgagttttttgaaggtagggtttgttgttgttttgtttattgatttatttttagaattagtatagagtagatgtttaaaaaatgtttgttagatgaatacgtgaatgttacgtttgatatgatgtgatatttaagtgaagatattattgaaaaaaaattgaaaataaaggattggattttagagttaaggtagatttaatatgagtttggaagttgtttgttgtagtaataatttgggttttttaaaatgaataagtttatagagacgtagggaggaggaaaagaataggatgtgtaaggtagggtttttaggagagtgtttgggataagagagtagagagaggatgtaggaaatagatattaaagaagttattataaagtagttttttgtttatttagtttagggttgtttttgtttattttaattttataattgtttttttgttttttttttatggtattttattttatagtggaagcgaaggggttttataaatttgtttgatattgggttgtagttattaggtagagaaatttgaaatattgaagggattaaggagagaagttaggtggagagaagttaggtgaaatggttaggaagataggaatttggattgtatttttttttaggttaatattatttatagttttcgtatttttgggattcgaaggatttttttttgtttttattcggggattatgaaagttttattgaggattttaatttaggtagtatttttggaagtgatatttttattttatttggttttagatttggagtttagttttaataaatatttaaagatgatattgaaattagaatttttaagttagatataaagtatttgttgagtagtcgttaaattcgggattttaaggaaatataatatagttattatttgtgtttatgtttatagcggagtattggaaggggaagatgaaggtgggtttgttgtaaggtgaagttgggggttaaaatcgtggttagtgggggttaaggttagtattggtttttgtagaaaggggtaaaaaagaagtttattatttttgtttgttttttgtttttgtaaaagaatgagaataagaaaagtaaatagaatgtttgggataggaatttttgttttttttagattttttgtggttttagtgtttttttcgattgatggataatttatttattagttttaagattttaaagagaagtattatttggatgtaggaggtgggaggtaattttttttattttattttgaaataatttatgtgggaagttgttatttagaatgtttgggttttagagggtagatgggttttagagggggttttgatgtttggtgttttaatgggatatgaagttgtaggaagaattaaaagtttgttaggggtagggttttgggaggagtaagattagttggggtaggttttaagatagtggtgagtggggattgggaatgttggatttttgggttttgagggttgtttttataatatgtttggtttaatttttttttttatttgattatagttgtggtatttatagttgttattaggtaggggaggtcgtaatttttggacgttttttttttagggaggggtattttaaggttatgataatatgagggaagaaggagggagcgggagagaataagggaattatatttgtgggaggagaggagatttatttttttagttagaggttagtagaaatttgttttttttgggatgttttatttttgggatagaggtttttgtaggaggtagaggggagaaaaatgaaggtgattgtgttttaaattattggatttttttattttgttagtatttttttagggatagttgggtattgtgaggggaggatgtagagtttgtgattatgaggttagttaatgtgttttcggggatagaggttggtagaaaaaattttgatttgggatattggtagtgaggttagaagaagattttggacgtttaaggagttggaaagggaggtttggattttggaagaaggggttggatattttcgtgtaaattttaattatattttgttttttaggtggtttttgtaatattttattcgtttaggtggggttgttttggtgttagagaatttggttttattgaggaataaagtgaaattgaggtttggagaaaataaagtaagttttttgttttataggagtcgtgtgggtttgaatagggtttttttttgagtttcggtttttttatttgtaaagtaagttttataagaatttttataaggtttgtaattttttataaggtttgtaaagtaggtttcgtaattcgtagggtgatcggaggattataggtgcgatgtacgtgaaagtatagtataaacgggtgttagttttatggttaatgttacgggggtaggagttacgtttaggttcgttagtttaggtttttttttgggggttgggggttgggaggaggggattcggcgtagtagggttggggcgttgcgggggcggcggtttcgagttattaatttgagttgttcgtaagagattagaagtcgttcgtaaagcggaatttggaggaacgagggagggtcgtagtttcggggaatcggagttttcgttgcgatttcgtcgggatagtagttttcggcgtttcggtagttttttgttttcggggtattcgtttttttcgaggtgtatttttcgagggttgggggagcgtattttttttcgttttattgattaagtaattatttttaatgagggtttagtttcggagtttgttaaaggattttcgtttagattttaaagtgataattagcggggaatagagaggaaagtgggagggagatattcgtcgcgttttagggtttatagttcgtttttgtcgggcgaagaatttttttattttttttatatattttttgatttttagtgttgtattttggtgttttgataggggaggggtttgttcggttggatgtttaggattttagaggtagagatgtttttatttcgttttgtttttgaattggggtttaggttgagtttaggggtttttgtattttttttagggtagagagatatttttgttttggtagatgttataggttgagttatcgtttatttagataattaaaatttaggtatttttttttttttttcgagggttttttagttttttttagaatttaggtgtttttttgttttttttttttaggggtttaagtttgggtttttttggtatttggtatgtttgttttttgagagttaagttttaattttgtttttagtagagcgggtttttggtgggagatttagtaataagggtttttttagtttagttagggttagatagtttagtgatattagtgttagggttgggattattgattatgataggtttttagtttttagtaaatggggatgtttaaaggagtagatagcgagtgatttgtggttttgttgtttgattttggatggagttacgtttaggagtttggtagtaaattggggtatttgtttaattagtgatgatgttatattttggtaagagagttaaggttgtatgggtgatgggaggtttttgttgggattgatatgggtatataacggttttggagtagggttggtgttttaatataaatagggggtatagtagatgtttacggagttgggtttaatgaattagggtgttgttttattttatatagtatttaatttgtgataatttttgttgaattatttaattttaatttttttgtttttgtgttttaggtgagaattatgttttatatttttttatatttttaatagagtatataatagttgttttaaaatatttgtttattaattgataggtttttttatttattttgttattatgtaaataaatttagtttggattgaggttggtttttatttaaatttagaaaggagttatttttggagtaatagaaatttagtttttttttttttgattttttatagattgttagttttgttttttagtttttttgttttttttatttttgtaaggttttagttagagttaggaacgttagttagaatttttttttaatggatagtttaataattatgatgttttttataaatatgttatattttattataaaaaaggttaatagatagaaggaaattattattattattttttttttttttttttatttaattagtaataaggtgaaatggttataagaagagagagagaaaatttagaaaatatatatagatgaaatgtttataaggaggaaaatttgaatttggggtgaaggtgggaggagagagaatggggatagtagagaagatgggtaatttttacgagataaagttatagttggtttttggtggaagagataggaaaataaatgttgagatattaattagggaaggtttggggtggagattagtgggtgagattgttggttaaataaaaattttttttttgcgtgtttatttataatttagtaagttaaattaatagggcgtttattgtagatatttaggaaaattaagggatttgggaggaagaggaagtaattatgtagatgagagatatttatgattttttttggatttttttttttttagggtatggagagagtggagaaggaaataaatttttttttttttttggattcgttttttttgttttttttttttattaaaaaaatgggggtgggggtaagggttttgagaatttagagatgagtttgtttatatataaatttttaagtaatagtgaatggaaataatataatgttgttttgaaatttagagattttgtttttagtttttttttttttttataaattttatttataagttagtttggggtattgtttataaggtttttgttttttttttaggatttagtgtagtgttttgtattggtgtttttataatatgtttattaaatatttttttatttttagattattattttttatagagaatgtttgttcgtattatttatttttttttttttgttttttaaatttatattttttttgtttattattttattttttaattagttttaagaatagatgaagggttaatattggtaatcgttagtattttttgttttttttgtagtttcggaaatagaaattgtgagttcggttttttatttaggaaaggggtagagtatggaagagttagggttgggcgtttattttaagattatcgtggggaagggatttggtttatgttaagattttgttgttttattaggtagatcgggtaggaattggggttatttttattttttgtattattgtattgggtgttttgggttagtgtgcggcgtgttcgtattatataggagatttgtgattgggatgagaaaggaggaatgagaattatttgcgatttgttttttataatatttattttaggttttgattttatttttaagattttatttaaattttgatgtttattttagttttaggtttaatataatgagttttagttttatttttagttttttattttattatattttttttgtttttatattttttatttttatattttagattttttattttttatatttttttttttatatttttttatttttagttatagttttgtttttaattttagttttttattttttgtgtatttattgtttttttttttagtttttattaaaattttttttttattattgttttttttatttttgttatgtttttttttttagatttattattttttgtaattttgatttttaatgtatttttaattttttattttataggttgatttttgtggggtatatttgttttttattaagaagattaggttaaggaatattaggaggagaattatagttattaggattataataattatggtttatgtagggaatgaattatttttttttatttgtttagcgtggatatttttttgtgagttatttttattgaggtatggatggttttcgttttttgtggtttttgatgtgatagaatttagtttcgttttagatgtaatgagggtgaaagaattagtgggtatttgatgagtaattttagttttatttagatgagaagaggtagtagtgagagatttgttttttgtgattttgattgaaggttttatagtttttgtgattgttgttgttttttttgggttttttgtggattttattggggtttttatggttttagtggttagtgtggtgttttttaggttttttgtaggtttttttgggattggtgtgtttttttttttggtgtatatggttttttttgagtatagcgtaggtttttttggggtttttgtggttttttttgtggttgacgtggttttttttgggtgttttgtggatttttttgtgatttgtgttatttttttatgggttaatgtggttttttttgtatgttttataggttttgttggggttggtgtgattatattggttgatgtagttttatttttatgttttgtagattttgttgtagatgaggtgattttgttattgggtgatgtggttttttttttatgttttgtaggttttgttagggatggtgtgatttttttattggtcgacgtagtttttgttttatgttttgtaggtttttttggggatagtgtgatttttttattggttaatgtagttttttttttatgttttgtaggttttattggggatggtgtggtgtttttattggtcgatggggttattttttcgtgttttgtaggttttgttggagatggtatggtttttttattggttgatggtgttttttttttatgttttgtaggttttgttggggatggtgtggtttttttattggttgttttttttttatgttttgtagattttgttggggatgttgtggtgtttttattggttagtggggttttttttttattttttgtaggttttgttgaggatggtgtggtgtttttattgattgtcgtttttttatgttttgtaggttttgttggggatggtgtggtttttttattggttattttttttttatgttttgtaggttttgttcgggatggtgtggtgattttattggttagtggggttttttttttatgttttgtaggttttgttgaggatggtgtggtttttttattggtaaatggggttttttttttattttttgtaggttttgttggggatagtgtggtttttttattggttaatggggttatttttttatgttttgtaggttttgttggggatagtgtggtgtttttattggttgtttattttttattttttgtaggttttgttgggaatggtgtggtttttttattggttgtgttttttttattttttgtaggttttgttgggaattgtgtggtttttttattggttgttttttttttattttttgtaggttttgttggggatgatgtggtgtttttattggttagtggagttttttttgcgtgttttgtaggttttgttgaggatgatgtggtttttttattggtaaatggggttttttttttattttttgtaggttttgttagagatggtgtggtttttttattggttaatggagttttgtttttattttttgtaggttgtgttggggatggtgtggtgtttttattggttgttttttttttattttttgtaggttttgttgggaatggtgtggtttttttattggttgttttttttttattttttgtaggttttgttggggatagtgtggtgtttttattggttagtggggtttttttttcgtgttttgtaggttttgttggggatgatgtggtttttttattggtaaatggggttttttgtttattttttgtaggttttgttggggatgatgtggtttttttattggttgttttttttttattttttgtaggttttgttgggaatagtgtggttttttcgttggttgttatttttttattttttgtaggttttgttggggatggtgtggtgtttttattggttgttttttttttattttttgtaggttttgtcggggatggtgtggtgtttttattggttagtggagtttttttttcgtgttttgtaggttttgttgaggatgatgtggtttttttattggtaaatggggttttttgtttattttttgtaggttttgttagagatggcgtggtttttttattggttaaaggagttttgtttttattttttgtaggttttgttggggatggtgtggtttttttattggttgttttttttttattttttgtaggttttgttggggatggtgtggtgtttttattggttagtggggtttttttttcgtgttttgtaggttttgttgaggatgatgtggtttttttattggtaaatggggttttttgtttattttttgtaggttttgttggggatggtgtggtttttttattggttgttgtttttttattttttgtaggttttattggggatagtgtggttttttcgttggttgtcgtttttttgttttttgtaggttttgttggggatggtgtggtgtttttattggttgttttttttttattttttgtaggttttgttggggatggtgtggtgttttcgttggttagtggggttttttttttatgttttgtagattttgttgaggatgatgtggttttgttattggtaaatggggttttttttttatgttttgtaggttttgttggggatggtgtagtgtttttattggttgttttttttttatgttttgtaggttttgttggggatggtgtggtgtttttattggttgttttttttttatgttttgtaggttttgttgggaatagtgtggtatttttattggttgttatttttttattttttgtaggttttgttgggaatggtgcggtgtttttattggttgttttttttttattttttgtaggttttgttggggatagtgtggtgtttttattggttgttttttttttattttttgtaggttttgttggggatggtgtgttgtttttattggttgttttttttttatgttttgtaggttttgttagagattgtgtgagtttattggttgatatggttttttgtatgttttttgtagtttttgttaggagtttgtttgaggtaattgttgttttggaatttttagttttttttgatttttttggggtttttgtggttttgtatgttgtttttgaggttgttgtgattttttttggaaaagatgtgtttttttgtttggtttgtgaattgtttgagttgtggaaggaagttgtagttttatgtgagttggtatttgttttatttaaagtatttatggatttttttaaaggttttttagttttatttgatttttttgttatcgttgatttgtttgttgtggatttacgatagtttattttgtttttgggtgttggcgttatatgtttttttttagcggattttttatgtgtggtagtggagttagtaggattaatagagcgttggtttcggattattgggttttttttttggttgttggagttttttttagaagtgggaggagttttatgattatttgtagagtttttgtggtttatagttttggagttgtttgtaggtttgttagttggtttagaatggcgtgtggtgttgtagtggcgtttttgtttatggatttttgtagatttagggagttttggaggtttttgttttgaatgtagaataatgtgattaaaagggatattataaataaggtttggagtgaggggaaatatgtgatcggatgttgagagttttttagttttttgatatttttggaatgtagtagtatttgtggagggagagaggtaaataagaaattttttttatgtttttttttaattttttttttttatttttttttttaggggatttttttgttttttttgatatgattttttagttagttttttttgaatattatgatatttattttttatttttatttttagtttttaggtttaggttgtgtttttagtaagtatgttattttatttttttttatatttttttaattttttattttaaggttttttggttttaaggtattttttttgattcgtttaagtagataaaatttagttttattttagtgtttgaaaaggtttttatttattattttgttttgttatttttaattttacgttatagttgtttgcgtgtttgtcgatttttattttttgttatgtttatttaatggtaaggttttgagggtatgtatggattagtattttattgtgtaggtgtttttttagggtttgtaatttatggaatggagttttttttttatggtatagttgagaagattaggagtaaacgttagattttttatttttttataatattttaatattattttaaatgtaatagtgtgagaaattgaggtaagatttttggtagaattttttatagggattagtaggtagatataaattgtgagtgagagatgtataagaagaatggaggatgggtagagtaaggagatgggaagtttttatttcggtgataaagttggatgaggggaatggatgagatgatttaatttttatggttattttattgggtttttttttttatatatttaaagttaattggggatagatgaaaggggttattttgaaaggaaaagatatttgtttgggggttttgataggagtaaacgaggtaattagattgtggtagggattgattatgtttaaggatagggtgtgagagaaaatatttttattagtggatagatatacgttttaattttatggaaaaataatttgatggagatagaggagatgtttttgatatttagttaaaagagtgaaggttaagagattattaaagagtgaaagagatagtgttattatataattgaggtttttggtttttgttagtttaaggcggtaatcggaatttggatttatttttaattataagaaattatagtttatttgtttgttgatgggtagaatcggtttggggagtttagtttttgaaagaaatatgggtaggataagaagggtgtgagggtaatagagaagtttaagtttttgaaaggaattgagaatgaggggagagaagggggttgaatgattaggtttgtattttattgttttaattttattatttgatttttttggtagtaatattagtaatagttattgtttattggatatttttttcggttttaggatgtggttggtggttttatagatattttttttttggatttttttttatggtgattgattttttaatgttttataaggttttttagaagcggttaattttttttattttatatttgagaaatttatattttacggaggaaaagtgatttgtatatagttttataataatagtaatgggtaacgtttttagagttttataatgagataggtaggttttataagtgagggtatatattaatttatttattttttataagaatttgttgaggttgagaattattttattttttaaattttatagatgaagaaataaggttttgagtggttaagtaatttttttaaggatatttagtaagtaagaggtcgagatagaatttgaatatatattttggggtttcgggtttagattattgttggttaagattatagtgtatagttaataggttagtttagttttttaaagaaggaaagatattgatatgtgtggattttttgaaaggtgttgtttatatatttgtttatttaattaaataattatgaatttgtgaagtgaggagtgtgattttattgttttataggtggggaaaggagacgtaaagaggttaagtaattggtaaaattagattttttattgtgttttagatgtttttaaatatgataagggatgaatgattatttattgagtgaataaaggagttggtagtaatgtaaagggtattttttattggttttaaagaattagaggataggtttgatatttaggttcggttttttagcggttttgtatttttgtttaggttttttaagtgttttgaagttttatgttttcgattgtaaataattatgatgttgattgtattagtttaatgtgaggattaaaggaagtatggattatggaagattttggagtatagaagttatttaaatgtttgttgaatttatattgtagtttttgaaataatttcgtgttttgttttgttttttttttggtagtaaggggagtttgagtagtagttttatttttttgtttgttttatttattttttatttgttgtggttatttttttgaaaatagtagtttttgtatttttgggttattttttttgttgtgttttaataatatagtatttattattttttgatatgtgataaatataattaaatttttataatggtaaggttttttttgtttgtttgttttttgagatggagttttattttgtcgttaaggttggagtgtagtggtgcgatttgggtttattgtaatttttattttttgggtttaagtgatttttttgttttagttttttgagtagttgggattataggtatatgttattatatttagttaattttttgtatttttagtagagatggggttttattgtgttagttaggatggtttcgattttttgattttatgatttgtttattttagttttttaaagtgttgggattataggtatgagttattgtattcggtcggggtttttgttgttgttgttgttgtttgagatagagttttattttgtattaggttggagtgtagtggtatggttatagtttattgtagttttgattttttgggtttaagtagtatttttattttagtttttttgttagttgggattataaatgtgagttagtatgttttttttttattttttttttttttttttttttaagacgtagggttttattatgttggttaggttggttttaaattttggtttttagtgatttttttattttagttttttaaaatattaggattataggcgtgagttattgtatttggtttggtttggtttggtttggtttggtagggatttttattgttttgtttatcgttgtttttagtttagaatagtgtttgatttataggaggtattttgtaaatatttgttgaataatgaatgaaagaataagattgatgaaaattttttaaaagttttgttaataatattttattatgtacgttaagtaaaaattaaatgtatttgtgatttttataggttggaagattaagggcgattttcgttgtttagtaattgagttttgagattaaaagacgttgaaagaaggtttttggtttattaattttgggatattagttgttattaaattataggattatagtttataattagatttagataataagattttagaattttagatttgtattaaatagttgtggaattatagattgtaaaaagttgaggtaaagtttaagggattttttggttttgatatagttaagaggtaaattagtgtaaatttttaggataagaggagtatttttgttttagacgatttattttggtagtgatttatttttttagtaagtttttattaggagatatttattttacgtataattattatagttcgaaaagaattgttttggttattgaagaataggtaggaggtgtagagaggaaaatttaattttagtataagatattgtaggtggatgtttagttgggataaaagaataagaataaattttataatattaaaacgatgtatagtgttaaaggttttcgttatttgttttgtttatttatttgaaagagaggatatcggttgggtatagtgttttatatttgtaattttaatattttgggaggttattgtgggtttgaggttaggagttcgagattagtttggttaatatggcgaaatttcgtttttattaaaaatatgaaaattagttaggcgtgttggtaggattttgtaattttagttatttaggaggttgaggtaggagaattagttgaatttgggaggtagaggttgtagtgagttaagattatgttattatattttaatttgggttatagagtgagattttgtcgaaagaagaaagaaagagagatagagaaagaaagaaagagaaagggaaagaaaaggaagaaaagaaagaaaaggaaggaaggaagggaaaggaaaggaaagggaaggaaggaagggagaaagaatattttgttaagtaatttatgttttggagtcgttgttagggtacgttgttttaaaagagtatttttagtgttttttggtatttttatttttataaatggtatgttttatttgtaataatgtgggtaaatgtttgttaaaatatttatatagtatgagtttaataagtggtttaaaatgtagatatagaaaaagaaaagttggtgggtatagttgtttatatttataattttagtatttagggagtttgaggtaggaggattattagtttgagattagtttgggtaatatagcgagatttgtttttataaaaaaaaaaaaggaaagttaaagggagatataattaaatgattgtttggggattagggagtatatagagattttattttttttttttattttttttattttttattttttataatgagtatatattatttgtgttatagaaattaaattaaataatatttgttataggaaaatgtttttgttagatttttttaaggattttagttttaatttttattttttgttttatttgtatttttttagatggttttatttagattgtatttgtgtttttttagatgattttatttgggttgtatttgtgtttttttagatgattttatttagattgtatttgagttttttttagatgatttaatttagattgcgtttgagtttttttgtgatgatttaatttggattgtatttgtgtttttttgtgataatttaatttagattgtatttgtgtttttttagatgatttaatttagattgtatttgtgtttttttagatgttttaatttagattgtatttgtgtttttttttggtgatttaatttggattgtatttatgtttttttgtgatgatttaatttggattgtatttgtgttgttttcggatgatttaatttagattgtatttgtggttttgtgattgtatgatgtagattttggggttttaggatttagttatttgtttgggtgttgattggttttgtggataaacgttagggtttttttattagaatggtagattaaagggttttatttattttagttgttttttttttttttttgttttggtttttttttttgttgggtatagttatgtattagttttgatttatattttagttttattcgattttattataattcgagtttagttttaagttttttttatttgtaatttatttatttttgtttttaaaatttgtagaatgggagtagttagttttttttgttttttttatttttttttttatgtcgtttagttacgtttatttttttttcgagattacgtttatatggttttatcggaattttaggaatttagattttcgttttgaagtaaattttagagcgattgtgtatggagtggattttttttcgttttttgtaggttttttttttttaagttgtaagatggaaggaggagagagtagttagtggataattcgtttgagaggaaggggaaggaaaggcgggagagatggggtcgggaggtgttgggtagttgtggtatttttgtttttagatttttaaggtaggggagatagatattaagttagggtatagataggacgtattgttgagattttttagaggtagtttaaagattttttagttatcgttatttattatttatttgtttttgtttttatttttggttttaatttgattgtgtttagggaaggggtattgtttttaatattattttgtggatggttttgtttttggatgattgtttagtgggtagatagtgtttttgaatttgttgttttatatttgttttgtggagatttttttttaaattgtttaggttttttatatcgtttttgtgtttagtatttttgtttttcgggtttagtagtagttcgttttttgattaagtgaattaattttataattttattttatttttagggtatgttttgttcgtcgaatttgtttatagttatttttttattaaagttttgagatgttttttaattgtaagatagggatagagtttttgacgtatatttttttgagtttttatgtggattaaatgagtaaatgtggatgaagtttttagagtaatatttggtgtagtgtaaatgttttgtaggtattaaatattggtacggttgggtagtagtatttagtttattttatagatggtgtggaaggttagagtaggtaaatgggttagagttaggattggaagttaggtttgtataaaatagagtttttaggagagaagttttatttgtttttttagggttgggggtagtggagttggaatttttgtttatttttttttagttgtgagatatgggatataattattgtgaatttattttttttaattataagatgggatattattagttattttaggggatgttgagatgaaatgagatgagtttttgggtacggtggtttttatttgtaatattagtattttgggaggtcgaggtaggcggattatttgaggttaggtatttgagattagtttggttaatatggtgaaattttgtttttattaaaaatataaaaaaatgagttaggcgtggtggtaggtgtttgtaattttagttatttaggagattgaggtagaagaatcgtttgaattcgggaggtagaggttgtagtgagttaagattgtgttattgtattttagtttaggtaatagagtaagatttttttttaaaaaaaaaaaaaaaaaaaagaagaagaagaagaagaagaagaaagaaattattatgagtagttgtgaatttcgtgtacggtgtttaatgaatgttaggtgtttatttttattatttagggttggtagtttttatagtgtttttatgtaaatttgaagaaattttttttggatgggtgtagttttgtgagttatgttttaaagagtagagtataggttggattttattttttattatatgttttttagttagtaaatttgagtagagaatattttagataattgtttgtagtagtttcgtgttcgttttttttatttatttttatttgttgtttaacgttatgaatattaagaaataagttgtttttgttttttgtattttttgtgggtattttatttgttttttaagaagttagaaggaagaggaggtagtattggaggttaaaggcggagtagaggttgtggatcggttgggttatgtcggagttgggtggttgtttggggattatgggttgcggattttttattttatatggagttaattttgacgttatgggggttggggttttttaggattaagttttaaataaatggagttattttaatttataggggagttttgataagaggagatcgtagttgttgcgttatggagttaggtatttgggtgtttgtcgaggggtgggatttgggggtagggtagaggaattagaaaggagtaggtatttgagttagttttagtggagggaagtgagggtggcgtttttagggttttggggaagtggggagtagatggtttagttttagaaggattgagttttggttgggagtaggatggggtggggtttacgttttgatttgtgtttagttttacgcgtatttttttatttttttcgtattagtttagtttttatattttttatttatatatggttatttttgttattttgggcggagttgttcgcgaggattaggtgaaagagtaaaggcgagagaaagttttcgaatgattttcgttgtagagaaaggtgttttatgatgtttagaggttatataataatatgtggagagtgtagaggtagtgatagagataagatatagaattatagggatatatgttatattttttattagggatatagataggttaggttatttagaaggatcgaggttaagatttttggttaagagatgttcggtgtataggggtttttgtttttattttatttttttttttttattttagtttagcggttgtttttttgtttcgaagtttttatttatttttatatagaaatgtagatattttatttttaggagtattttagagttttttttttttttttttattttttgtttaaagtaagtattagtttagagatttttttgtttttttagtgatagtgtttggggttggagtaggggaggatagattttttgggtttttagtatagagaagttataatttttttttgtttattgtgggtttttatggaaagtaagtattttggatttttgttgtgttattagagtttaggatagtgtttggtatatagtaggtaattaataaatgtttttatttcgtttggatggagtggaagttagggtcggaggatgtttttttgagggaagtgggggtaggtaaaggttatagagaggtttaggatttgagggtaggaggttaggtttttagggtatttgggtttatgagaggattagagaattggatatgtgggtttttttttttatttggtgtgatttgtttttaagttttgggtagggttggaataggtgggaagaggagaggaggttaattgtttattaatgtgattaatgggagattaatgaggtttcgtggagttaggttaaagattgattatttagaattgggtagtttgttttttaggtaatatattttgtaggatggagaaattaaggtagatataggttgttttttgtaattttatgtagattcgggtgattgatagtttttttttttattggtttttttttttttttttttttttttagggatttaagtttttaggacggtggttttgtatagggaggagtaattttgtttatattagggaatatttggaaatttttggagatatttttgttataatttggagtgggatgttattggtatttagggggtagaggttagagatgttgtgggatattttataatgtttagagtagtttttatagtaaagaattatttagtttaggatattaattgtgttgaagtggaggatttttgttttagaataagtattaattagtgtttgtgaatgaatattttttttttttttttttgagttataattttattttaaggacgttgatgtttgggatggagaaatttggaggtaggtggaggtttaaaatagttttttatagttagtttatgttgttttatttgagttggaggttgagaggttagttacgaaataattttgttaattattattgtttgggtatttttatgtattgaagaatgtattaagtattttatttatgagttattatttgttatttttattttatagatgaggataaatgagtttcggattagggaatgatttgttttggtaattggtagagattagatttggttttttcgggtttatatgatataaaagtttatgtatttgggtaaatttatagtatttgggagataagtggaggaagtgttattttatttagtaataatttgtttattatttttttatagtagatcgagggggtattatagaggagggttttgtatttgttttgaggggagagaattagagggttttgggggtttaagagttagtttgagggggttttttgtggagggaagtgagaagggaagtcgtgagtagattgtttttagttaaagagtttttttggtcgttagggaggagggtgggattaggaagagagggtgaggggtaggggttttagttgtttagatttgggtttcgtgagggttggaaggtgtttgtagattatttagttttggtttttttttttatagatgagaaaattgttttcggagaagttgggtattttttcgtagtttgtatggttggcggtaggatagagagtagaattttgtgattgatagtagatttttttttacgttgtgggtggaagagatttgggggggttagtgattttaggaatttatttgtaggaaatggttttagttaaggtgaatgggataggggagtttgggaatgagattatttgggagaggaagaaggaaggttaaagggtaggcgtttagttgttttagttttattttttatttgataagagtagcgttggttggtagttttttttttatggtggttgttgtaaggggttatagagttatagttatattttagatttattttttttcggaattggtaggtttgtgagatgaggggagggtacgatgggttaatttagggattcgggaatttgttgtttagtttagttttttttatgaattgttgtttttttttggtaatttaggtatttagtatttttttttgagtaaaaatagtaataataatgaataaggttgtatattgagtatttattataatatatgttaagtattattagtgttttttttgtataagtttatttgatttttttaattattttttgagatggatgttattatttttattttatttaggatttaattattttatttgtaaaatgaggagtaatattttttatattattggtttgttgtgaattaaaatatgtatagtatttagtatatttagtatataattagtgcgatgtaatattattattatttaagtattattattaatgaagaattcggagtatagatagattaagtaatttgtataaggatttaagtttaggtgaatgtggttttatagaattggttttttattgtttagagttgagttgagtgtttttacgtgttagttagtttttagtattttttcgttttttttagtggttttaattttttatttttgttagatcggtgtttttttcggttattgagataagggttttttttgttttttttgtaataagttttgtaagttgttatttttttttttaaagttttgtttttttttgaattttggggtattaggttttagttttattggtatagggattttatatattggattatggtattgtttatttttttgatatcgtatattaggttgataattgttgttattaaagtgagagtgattaatataatggtttagtttgagatagagtttttttggggtttcggatttggggtataaagatagggttagtgattgaggtaagtggtgtttttagttttttagatttttattgttttttgattttttatttttttttttgtgattgatgtttttgattttgagattttatttttttggtgtttttttttattattttgggagtagaattttagtaggggtgggggtgggggtttaaagggttttaatttaagttttaattgttttttttttgtggatacgtttgttagttttagatttattattgaggttcgtattttattgtttttttcgggttttattttttgtatttttgggtttgtgatgtttttgtattgggagggtttttagtaggtatttttttttttttaagttttagttttttttattattttattttgatttttgtttttaaggggaattagagtttgattttttgttttttttttattcgttttttgtcgttagatttttcgcgtggtattttttatgttttttttttaggaatgaaagggaggggaggaggatgatggaagaaggaggggtgatttttggaaggaatgtttttcgttttgaatagagagattagattatgaggaagaaagatgaaaatttttcgagaaagtagttaggtaataggtatttggtagttggtttgattagaggttattaaaatttttttgagttatagatatatttttagataggtttaaaatatagttgaaagtaggagttaatgattttttttgaattttttttaaggagttaggggtggttgtagggaaatgagagagaataggtttattaatattttattgtaagtgatttagtgtttagaagagtgatttaattggttaggatgttgagtttagaggacgtggtggttatttagttatggtggtagtggaatttttaagatagtaatatttagtgttaaagttttaggtatagttggagttgtttcgggagtattggatgaggtaggttttaagagggtagagggaaaaaatagaagagatttaagtaagagtaaagtagaggttatattaaatgtatttataggtaagattttagtaagtttttggaataaattgatgaaataatgttatgaaaattaagattgagaataattaagatatttttttaaaaaaaaaaagggagaatttatattatgagattttaagatttgttataaatttgtagtttttaagtattgtggttttggagtaagaattgattgataggtcgggtgtagtggtttatatttgtaattttagtattttgggaggttgagataggtagattatttgacgttaggagttcgatattagtttggttaatatggtaaaatttcgtttttattaaaaatataaaaaaattagttgggtgtggtggtaggcgtttgtaattttagttatttcggaggttgaggtaggagaattgtttgaattcgggaggcggaggttgtagtgagtcgagatcgcgttattgtattttagtttaggtaataagagtgaaattttattttaaaaaaaaaaaaaatttatcgaaaaatttatataaatagttatttgatttttaggataggtgtttatcgtttaatggtagggataggggagggtttttggaaataatggttttggatatttataagaagaaaaaatgaattttgatttttatttcgttttatatatagaaattaatttgagatggataatagatttaaatttgaaagttaaaataataacgtttttggaagaatgtagaggagaatatttttatgattttgaagtagttaaaaaagttttaggatataataggaattaattatgatagaaaaaggtgatgaattggaaaatagaaagagaggtttttgtatagttataaaggtaagggagttgtttttattgaggttttggaaaattgttaggtttgtaggaagttttattttagagttatagatcgagttgaagggttttttcgagatgggttgagtaatagaaatattatttgatgatgtggagattgtttttgaagtgtttttagaaacggttggagttaaagattgaggattgttgggaaaatttttagagtttgaagaaattgttgagatatttttagaggtagtagggagatttttagagatagtggggatagttgtagagatagtggggagatttttagagatagagggaagattttagagatagtagggaaatttttggaaatagtggggatagttgtagaaatagtggggaaatttttagagatagtgggaagatttttagaaatagtgggagatttttagaaatcggggagagttttagagatagaggagagatttttagagatagtggggagatttttagagataggggagatttggggatattgtgttagaagtttttagtagggttagttgaattgttgaaaaaagaagataaattatagaatagggttagaagagttggttattttattgggttttaaatttatgtttttttttaagattttttgtttgggtttaagtgtttattgggttcggttaaggtttgtaggtttaggagtagtattagtatagtgtttatggtattagttgaagtgtgttggttaggtttattttttaggttttttaaaggttttggggtttattatgagtttcgggagagttagttgtgtcggggtttttattaatattagaatttttatttttagagagaggtcgttaagttgttttaggggattaatttgttttagtttgattttaggaagtatagggtgagggggagagtgagtaagagtttgcgggtttttttatttggtttttgggttttttttggattagggatttgttttttaggtttgagttaatttatagtttagatttttttttaaaaggggagatttaaatgatttattttaaggttatttttttgtttttagaagtataatcgttggaagttaggacgtatgagttttttagggaagtaggatttggaagttggggttgtaggggaattatgagggtttaggattgtatttgattttttggaaatttaagagtgggttgggaaggttaatatttgagtcgtgttttatttagatggttgtagttgatagagttttttatttttttgatagggaaggggaaaggggagataaggggtattaaggaagatacgtgttatgtttggggatagtgtgatatggaaggttagattttagttttggagttagatagttttgaatttttagaagtttagtattagggttgagtttattgtattggaatttattattgttgagttgtgtattttttggtaagttataaggtttaagttttaattttatttttaaaatcggggtaatttagtatttattttataggcgtttatgcgttataaaggaatatttagtgatgagtttagtatatggttgtagaaagtgtgggggaggttaggtgcggtggtttacgtttgtgattttattatttagggaggtcgagggggtggattatttgaggtgaggagttggagattagtttggttaatatggtgaaattttgtttttattaaaaatataaaaattagtttgttgtggtggcgggtgtttgtaattttagttattcgggaggttgagttaggagaagattgtattattgtattttagtttgggcgatagggatgagacgttgttaaaaaaaaaaaaaaaaaaaaaggaaggaaaggagggagggagggagggaggaagggagggaggaagggagggagggagggagggagggtttttattttttttcgaggaagatttttttgtgtttttaattttattttttgttcgttttttttgtgtttgttgttttttttttttatgttttttttttattgtggtttttttgttgttttgtgtaagtttgggagttattggttgttttattttatatttatagtgtagattaggtttttatttttgtttttttattttgtttttgttttttttatttttgtttagtgttttttttgtttttgtttttttgtgtttagtttcgttggttttggggaaggtggagaggttgtatagggaagtggtagataggaagatgttggtttgtgtttttgtgtgtttaagtaagtttttatggttggtgtgtttttttgtttggttagagggatgggttttaatttttttgttatttgttggttgggtgattttagtaggttatttattttttttgtgttttatttttttagtttttaaagagggttagtaattttttttgtatatttgttttgtgtttgtttgttttagcgtttgtttgtaggtatttcggtcgggagtaggtgggtgttttttttttatgggtgtataaggtaggagtgagaggatgtttgaggaaattcgtgtttttttttgataatttaggatgcgttagagtaagtaaaatagaatgtttagtaatggaagtttttatgattagattttttatttagaaagttattaaggttggggaagtagtgtttatagtttattatagatttaattttttgttttattttttttattttttttattattgtatttgattagtgtttaaaaaaaaaaaatttgagggagtaggatatttgggttttggaagaaatttggtttaatttattttttttttttgggtttatatttttgagtttttcggtgttaagaatgatgaaaattagttgtagttaataattaatttttaaagatttttgggaggttcgggtatgggtgggggtttagatatttgtaggagggacgtttttttggttttcgtttttttttttatttttttgtttgtaggattcgtatttatttttttaaatttggagatataagggaggggtgggatatagagtggaaaagaggggatttttttttattttttttaaaagtatagtgaatggtttttttttgggtttttttttattgggagaattggaaaatttagttgattagatttttttttttatttttttttaaatatttatgttaaggtttgagtggggtgtagaaataggtttgttaaggagaggttatcgggattttagtgttttttttattttaggagcgtagtggttattatggggtttgggttgttttttgttttttttttgattttttttggtagtttatatggaataggtgagggttagagggtaggatttttgggtttttgtggtaagaagaggttagagaaaaggggtgggattttatggtttttgagagtgatagagatattttagttttgagtttttaagaggttttggaggggtattgttggggaagaggaattgtgtcggggagcgtgagtaggaaggttttgtgttttcggaggaattagttttgattgttgggttttaagttgtatttttggattcgtagggtcgggtatgattttgtaattgaagttgaaggagttttttttgataaattttttttatgagtttagttttttggaattgtttgaaaaggtagttttttggaaggggaaagatggggttgtgtgtttgtgagttagtttgggtttttgttggggtttggatgttttcgtggtgggaatggagagtttttttatatggcgttttttaattttttgtttttagttttgtttttttttttatttttttttagggattagcgttattttttattatgtaagattttaatattatgttgtttgtaatatatgatagttattgaagtttgtgttttttttggttcgggtttttgggtcggggatgtaggaggtaggtttcgattttgttttttagtaggtttttatttttttgagcggtaataaataaaattcggtatgttgaatttaataatttgtttgattttgtgggtttttgagtatagagttggtaggaagtgggggttggatgtttaagtttttgattgtttttttgttgagtagagggttttagggatggataatgttttttttaatattagtgttataggtttataaggtatttggggagttgtttggggatatatatattatatatatatacgtatgtataggaatatatattaaattgagatttttggaatatttgggaataaagagaagtaatatttattgaagttttgttttttttttgtatttttatttcgatgtttgtagtagttttgaatgtggtatattaggtattattattttattttatagataaggaaattgaagtttagagagggtaagttatttatttgagatttaatagtagtggagaagttaggtattagatagaggttttggtttaagtaagatttttattttatttttttttgtttaagtattggggttaggggtttaaaaattaaagaaagagatataggtagaatatttttaggatatggtttttttggtttatggatttatataggtaattggggtgggaggtgggtgggtatttaggtgagagatgacgggtttagtttgtgagaggatgtttagttaggcgtaagtgttggggaggagaggttaggtgtaagttgagtttgttttggttaattatgtgagtatgaggtgatattagtttatatgtgaatttttgggtatgttttttatttttttggagtttttatttttttattcgtaaaatgggaataatgatggtatttgttgtagtgtgataggttttttattaggttatttaacggtgtatgttattgtttgaattttgaaggttaggtggcgagttaaggttacggtgtttggtcgaggagtaggtgtttttgagaatttaaatatttcggagagtatttgggaatttattaaggaaaatagtttattcgtatatatatagtcggtagagttagaaaattagtttgaaagtagttttagtatgggaggtagtacggatttttaaagttgttttgttgttatttaggagtgttttgtatgtaagttttaaaaaatttatttatttattaagttggatttgtttgagttattttttggttttttagtttttttttagtttgggggaaggtttttgttgttgttgttttgttttgtttttatataattttgagttttttttattatttttgtattattaggttgttgtgaggattatatagggaagttatttagggatatattatagtttgttttataggtcgtcggtaggatggtagggattgttgttaggatggaaatttggttttaatatataatttttagttttttggggtttagggttttttttatgttgatttttgaggtaggtatttttgattatttttttaagattattttggttaggcgtagtggtttatttacgtttgtaattttagtattttgggaggttaagttaggtggattatttgaggttaggagtttaagattagtttggttaatatggtgaaacgttatttttattaaaaatataaaaattagttggatatggtggtatgtgtttgtagttttagttatttcggggagttgaggtagaattgtttgaatttgggaagtagaggttgtagtgagttaagattatgtattttagtttggattatagagtaagattttgttttaaaaaaaaaaaaaaaaaaaaaaaaattgattttttattagtttttaaaatataaatttgtagtttagatttgagtagtggggggtattgataggattgttttttgttttttgtggtatttattttgttttttatatttatataattttttattatttttatatgaaattggagattgatttttttggagatagaagataataagagtttagtatggagtattattgaagatgaggggagtatagaaaatggtagggtggaaaaaaaatatttaaaaaattggtttatttttttttataattgttttgggataattagtttttaaggagaggtagtagggggttttaaaggagattagtattttatgatttgtttttagtttgtagtaatgggtaggtgacgtttatggggtagttgtgaggatttttaaataagttgggggattggatatttgaatgtttaagaggttggtagagtagatagttaaatgtattttaatttggtttttagattttagggtttgagattattaggatgtgatttttagattattttttttaaagaattgttttttaaggtttaaaatagagtagtgtagtgaagagtgttttggggtttattagatttgggggtggtagagattgttaattggtttttttaatagttatttttttttttttggatagttatgtagattttaatttagtatgtggattattatattttttagttttttttgtagttagttgtggttatgtgattacgttttgtttaataggatgtaagtagaaaggaggtgggtaattttttggtagtatttttgaaaagaaaggagtttttattttagaggaggaaaagtaaagtttttgaaatagtttataaggttttagattagtgttttttaatagaattttttgtgatgatggaaatgttttataatcgtgttgacgaatatagtagttattggttatatgtaattattaaaatatttgaaatatggtaagtacgattaagaaattgaacgtttttattttatttaatgttttaggtagttaattggttattattttggatataagttttagattgttcgttttgagttttttttattttttattaattttttatttttatttttgtttttttattttttattatttttttttttttattttgttttattatattggtttttaggttatttttcgagttgtttgattatgtttttatttgtttttttttggtttttttttttgtttggaacgttttttttatattttttataagtttttgtttaaattttatttttatagtgagttttgttttgatttattatttaaaagtataatttgtttttcgttatataaatatattagagtttttttattttgttttatttttttttttttttttgtatttatgatatttaaatatagtatatcgtttatttatttgtatgttatttttgattgttttgttagaaggaaagtattataagggtatagaattttgttttatttattgatgaatttaagtgtttagaataaggtttagtttatttatagtaggtgtttaaaaaaaaaaaaaaaaaaaaaaaaaaaatattttgttgaaatagagtaaaaagaaaaagaaaattgtttattttttttttttttttttttttttgggtggaaatgtagatacggtgatgggagttggtgtagattttggatatgaagtttgataatgtattagaatggtaggaaaataagattgaaggaggtgtgggtttttattattgtagatttttgtattatttatgtttagtagaagaaatatttattttatttaagttattattatatttgaagtttagttatagtagttagaaagagtttgtatttaatttattgggttaggttttagtggagatttttttttgagtatacgtttttatttttaaaatgggggttgggcgtagtggtttatgtttgtaattttaatattttgggaggttaaggtaggtggattatttgagtttagaagtttaagattattttggttaatatggtaaaattttatttttatagaataattttaaaaattagtagggtagggttgggtatggtggtttatgtttgtaatttaagtattttgggaggtcgaggtaggtagattatttgaggttaggagtttaaaattagtttggttaatatggtgaaattttgtttttattaaaaatataaaaaaaatttagttgggcgtggtgatagataattgtaattttagttatttaagaggttaaggtaggagaattatttgtattagagaggtagaggttgtagtgagttaagattttattagtgtattttagtttaggtgataaagtaagatttcgtttttaaaaaaaaaaaaaaaaaaaaaagtagtagggtatagtggtgtatatttgtggttttagttatttagaagtttgaggtaggaggattattagagttttggaggttgaggttatagtgagttatgattatgttattgtattttagtttgagtaatagagcgagattttgttttaaaaataaagtaaaaataaaaatttttaaaatggagttaatattcgttttatgaggtttttagtaggattaaatggtattgtatatttagtattatagaggatttagtttaggataggttatttagagttgttggatagaatgtattttgggcgtggaagggttaggtttttgaattttatggagatgagatggtgtttggcgtgggtaaggtggttggttgtgttgtgaatgtgtaatttagaggttgggtatttaggtgttagagtatagaaggtgggggtatattatttgtagtatagtttgtagtttattaggtttggaggaagttttattttttttagtatttttagggatatagttaaggagcggggaagtttttatttagtgagaagtggaggagaaagagtttgtaaaagttagggtattgttagttagtttagaaagtaggtagaatcggaattattgtgtttatattttatttatgattagaaagtttttttttttttagcgaggatttttttttttttttttttagattaagtttttaggggataatttagaagtataaaagttattattgggagtaaaggggattaaagagttataaatagatatgtttgggattttaaaagtttattttaatttttttatttttagatttttaggtgggaggtaggtcgggtagtaatgtgagtattttaaggatattatagttattgcgattaagttagtttgtgtttttatttatataatgaaggcgatggattatatagtttttgacgttttattgtattttgatagttgataaatttgtttgtttttaaagataggtttgagagggaggaaaattgatggggatgatgagttagagtttcgggttttttggggttggaggtttatttattagttgtcggaggtgagaggttgttttgtttagttttgataattttagttggagggaagaaagttggacgaggagaaaaggaggtgaggatttaggaatgaggttttttttggtttatatttttttaggggtggagttttttgggggttttttttagttttattttttgttgtttttgagtttttgtttttttttttgatggggttttggttgtgaggttgttaagttgtttttgtaatttgtattttcgggcggttaatagaggtagttggatttgcgggtttattaggttttggggaagaatagggagaaaaggtttagatattcgtttgttgttaggtttttattttttattagaaggtttttttttttattttatagagtttagttttttttttttttttagtatgttttttaagtttgttttaattttttttattttttttggttatttgtagttttatgtagatttgagtcgtgttattgagtggagtttgggtttagtcggagggagttgttgcgtttgggggtaataggtttatagttttatagtagtttagggtgtttaggggttttaagaaggtttcgaagaggttttggtttttaggttttgagttttgtagtagtattggaaagaaagaaattgttaggggtaaggttttagtttttgtttttttttttattttgtattttttaacgggggggttggttttttaggttttgtttttttttttattagttttttttttttgtagggattcgagtttaggattcgttttgttttatttcggggtcgggttttggtgagttggtacgtggttcggagagtttttagtatttgtacgattttttggattcgggagaagcgtcgttttagttttggttggcgttagtgtttttggtaatgggggggatttagaattggtaaaggggtttttgggagatttagtattaattttgttggtttttttttcgatttatttattttatttttttagggtaatgagatttgtttttagtattatagaaaatttattattttaaggaatatgataaaaagtgaggcgttatttaagaggttttagatgattagtgtttgatgtttgtttagttgttgtgattgaaatggttaattaaaaataaattagaatttaaaatgaattagttaaaatttaaaattaaataagtataaatttaaatagttaaattttaaaataatttttgggtgagtttatagtatttatttttttgaagttattaaagttgtattgagattttggggatattttattattaatttatttaatttttattataattataatatatattattattgtttttagtttaaatatgcgggaaattgaggttcgattatatagtttaaaaatagtagtttagtaatagagttttgtttttgagtattacgttaatattgttttttaagattttagggttatcgtagtaattttgtaggaataatttattttttttagggttttatagtaaagtacgaattatttttgtagatgagttttttgtagtaaatttttttagaaggtgtttttttttatttatttatagatttattttaaggtgtttgggatttattaagttgtaggcgttggggtagggggtaatcgagatgttgggggtaggggggtaattaggtttggggggtagtttttgttagagttttttagttaggaagggtattagtggggttaggaggcggaggtcgaggttagcgtaggagaataggatttgagggggttttagggggcggggcgagtgttatagtacgggttttatagttttttggagaggaagttaatggttagaggataggtttagggttatagtttttttttttatagttattgttattcgttagtggggtaggttatgggttttgggagagagggataggtagaagtatttagtatttttgatatgatttatagttttaggatatatttagtataaagaaggggattttaggatagtaattttttgtagtatatagggataggatttttagggaaatatgtagtttagggaaaaaaattattgagttttttgtttattaataggggatagaggtttttaaaaggttgagttagggtagtggtttatagttagtagtagtagtattatttgggataagaaatgaatatttattatattatttatttttattttaatttgttaaaggagttattttggggtggtagtggagcgggggggatttatcgttaataagttttttaggtgttttggacgtaggatagcgtgagaatttttggtttaaagatcgttgttagttttttttaggttttttttagtacgtagtttgtttatgggttaaatttagtaattatagggattgaaaaaatttttttttgttttttgatatcgatttgttagatatttttagaagttttttttttttttttttttttaggtgataggtaggtaatagtgtttgggttgtattgttaaaattagttttaggaagaggggaattgagattttttcgttttttttttttttttaattgaggggataattgggaatttattaattttagagttttttgttttggaaatttttagaggaattagaagtaggtatgggaatattaagttttttttagttttatttattaggtagacgttatagaggttgtgaagttagaagtggtgtagggtatgagtgacgagcgagagttttcgggtgaggaagtttcgtttatatttttgggtagttagggtaaggcggtttaggatttaggtatttatcggggaggagggagatagttgtaggtagagggggtaggatggtttgatttttttttttttgttttttttttttttagatgttattttggttttttgatatttgattattttatttttaagtatttttgtttttttttatttttttagtaggttgtggtataaattttttttttaaagtattgaggataaagcgaagagtattttagattttgttgtagaaatgtcggtagttttggattttagagattgataggtgtaagtcgttcgttggaagggaagaatcgaggtagtttgtatgtaggtggtagtagtattagaagttttgtttttgttttgtttttgtataggtgttcgttgttttttgtttatttcgatatttttcgtttaggtttattttgaattttatgggagtagagtgtgaattttagggtatttgttttatatttagggatttcgtgaggaaagttttttttttgtaattagaggaagaagaagggtggtagatgtttttgtggttgtagggttaggatttgggttgtagaggaagttagaggtggtgagttagagttggtggggggtaggtagcgatgatttatttgtgttgtagttataatggttagttttgtagggtttaaattttcgttttttagttttttttgtagtatttggggatggaagggggtaatttacgatttaggtcgaaggttttgtttttataagggttatatttgttggttttattttttttttagtttgttttttttttttttgtaaattttgtaaattttgtttttttagtgggtgtttcgtttttatttgtatttttattttattgatgatgttttttgggtttagtatattttttagggatttgtttatttttcggttttgtttgtttcgaattatgggatgaagaagtatttgggggtagggaggggttaatagaggggggtttttttggaggtgttttgggatttttggtttttatatttttgggggtagggtaggaagtgaattaggaaaaaggaattagtaacgtggaaaggattatattaggggttagaagggaggataaggtttggggaatattggagttatagaaagcggtagggtattgaagggtttttattttgttgaagggtagttgttttgtgagttgggtttttaatatgattatgcggtttatttagaatagtagaaggtcgttgttcgtttttaaaagtgatagggggtagaaacgagtaaggtttggggtttagggggaagaggagtagtaagaggtttaggttttaggttttttttaagtttttgtgggggtttagttattttttttttatcgttttttttttattttcgtttttttaatttattttattttttggggttagtttagggtagaaaaggggaatagggtagaagaaaattatgtgtttaggatattaggatttgggaaatagaaaaagaatggggatagttggaattttggtttttaggattttagattattgttgttattattttaggttaatttttatttttagagattagggttgttttttttggttttatttttaatttttttgattttattttttgtattttgggatttgttttttttaaaggtttagatgtttaggttttcgtttttttgtatatttttttttagtttaggtatttatttttttttagggttagttttgtttttggtttttttgttagtttcgttgttatttttttggttttagtttttgatcgtttaattatttaatagtttttttttttttgtaaaagtaggaaggggttggggagagtgaggaagaatagttgataggtgtaaatgttatttggtttttacgtttttatgtggttttagagtggttaggtttttttaggggtgagataaagaaatgttattttagggagttttgatcgcgtagaaggttatatgattatgagtatgaagtatatgattaggtaggagcgggatttggttttgcggagttttgatttttgggttaggtgttttgtgttatattcggtttttcgggtgtttttttttatttatttgcgtatggttttttataattaggtaggttggaatttgatggttttattatagttgtcgggagatatattagtttttgtcgggaggatattcgtgaagttttagaataattagttagttttttttttttatttttataagagttttttttattttatttttatttaatatgggaaaattagtgttgttagtttttttggtggaaggagggattgagttttagggttttcgattttatagtttggagagaaaggggattttagataatgttgttttttttgtacggtcgtatttttatagataggacgagtggtttttgaggttattttaaaatttagaaaggattttttaagttttttgttaagattttgggtttgagtaaggatatgagttagtttttgttgggtcgtttagtttttattttatatatttttttagttattatagttggagaggtttttagggtaggaggttttttgttttttatttttttattttaatttttagggagtttttttaatttttggttttagttttttttatattgtagttttattttggtagttcgggtttttattttttggtagcggataaattattggttttttagtaggtattttattatatttttagaacggttgaaagagagatagggtgagtttattgttttttcggttttgtgattttttttaggggtataagattttatgttatgttaggtttttggtattgaggatataatagcgaataaaatcgatacggagttcgtattttaacggaggggtgtagagtttattttattgttatttttaagttttatatatttttttttggggtagtttttagtaaaggagttaaaatgaggttatttgtagatgggtagtattatggggtggttttggaggtttcggaataggttttatttatttagtatagatattattttttttcgggttataaatcggtgaagattttggagaaaaagcggtaagagtaaagattgaaggtttttagagaaataagaaattaggaggaggattagggggatagagagtttttaaaggatggggtaatatagggtggtattatttgtagttagttttcgtagagggaggttatggttttatttttcgtaatgatatttaaggggtttaagttatgtcgggtttttattttagtatcggtaggattgtgagttggagttatttttattgttttttggggagtatagttatggtgagtattgaatttgattttggtttttgtttttttagatgtattattattatttgtatcgttttagtttttgcgattttttttgtttgtgttttttttttattttttatttagattattttatatgaggattttttatttttattttttttttttttttggttttttttttttttttttaggatttttaatttttttttttttttttgatttttatttattcgtgtttatatgtggttgaatagtatagtttgtgatgaggggaagaggttgttttattaaggggtgacgaagttgtcgttcgtgtagatgttgaagggaagggagagggattaaggataggtatttgtgagggttggaagggtttgggttggggcgtgagaattttaggaataagaaggtagaaagtggaaggtagtaagttagagtaaggttagtaaatttttaaggggttagaatgtagatattttaggtttttgggtttagagataaatttatttttagtataattattttattatgttattgtagtagagttggagagggtatataatagtagttatagataatataaaggttgtaagtagttaggcgcggcggtttacgtttgtaattttagtattttgggaggtcgaggtgggtagattacgaggttaggagatcgagattattttggttaatatagtgatatttcgtttttattaaataatattatttaaaaattatattatttaaaaaaaattaattattaatttttgtaaaaatataaaaaattagttgggtgtggtggtacgtgtcgggtatggtgttacgtttttagttatttaggaggttgaggtaggagaattgtttgaatttaggaggtggaggttgtagtgagttaagattatattattgttttttagttttggtgatagagcgagattttgttttaaaaaaaaaggtcgtaagttggattaggattatgggttagtttgttaatttttgagttatagaaaaattataagaggaggagggagtttaattagaattattgagagaagttttaggaaaaggaagtagaagtaagagagaaagagttattatttaaaatttaagagaagagaaggttattggcggggcgggttagagtgtaggagcgtattgggtattattgtgtatcgcgagtcgtttggatgaacggttatagttatatttttaggtagcgtttttggttttgtggtttttattataatttttgtatttgaagataaatatttaaatatttatagttggttattatttttattttttattgttaatatagttaaaggtagtagaattggaaaggggaaggggtagggagtagttaaggtggaagaggtttttaggagtgattagaaaaaagtaggagtagtgtttataggaatttagggttttttataagttgatgattagaggtttgagagggtttttggtgttaaagaattttttgataatttgtatggaagaaatgggggtagtattaattaaagtaattataatagaatttttgttgggtgtttagaggatattggggatttttagtgttttaattataaatgttgtatattttttagggggagtattagtttttataagaagtttttattgataattttagtttatttgttttttttttttttgagttttttagaatatttatcgtaaaaattatattttagaggttaggtgtagtggtttacgttcgtaattttagtattttgggaggttaaggcgggtagattacgaggttaggagttcgagattaatttgattaatatggtgaaatttcgtttttattaaaaatataaaaattagttaggtttggtggtacgcgtttgtaattttagttatttaggaggttgagataggagaatcgtttgaatttgggaagtagaggttgtaggagtcgagatcgtgttattgtattgtagtttgggtgatagagtgagattttgttttaaaataaataaataaataaataaaataaaatatattttagaattgattttttttttgggtagcgtatttttgaagaattatattatatttttaaagggtagtgattatatgtattttttgtatattttttagaagattttgggtaagtgtttacgttgaggtgaatattattaaggtatatgtgagagatggattgatgggtttttagtagtttaatatgggttttagaaaataggaaaaatggaggtaaacgggtgattttgtagagtattatgtttattaggttttttatttacggggaaggtaatagaaaataggaggttaaaagatacgggggtggggtagttaggtagtcgaagttgtgtgtggttaggtaggggtcggttttttatttggaggtatcgagaaagttgggttagagggtagtttttttgtaaggtttatgtttaggttttattttgttatttatttatttgtttagtttttttgtaatttatttaaaagttatttggaggattcgggagttatttttttttgtttttatttaatgttcgtgtagttatatttttaataaatatttattgagtatttaagttatggttaggtattttgttaagtatttatgtgaatttttatttaatttttataatatttttacgatgtaagtattttattatttttaatttatagattgaggaagttgaggtttaaagagattaaacggtttgttaaaagttatatagttgtaataggtaggtattagatttgaatttaggtattttggttttagagtttgagtttttaattattgattattttgttttagagtttttataaatttgttttttttttttcgttttattttaatgttcgagatggttgattttaaagtatatgattagttgataagttgatggtttcggtatagtaatttcgttttgtagagtcgtataaaagttttagttatagttattgaggagttttggaatgatttgagtgtttatttttaagagttattttttagtttattattttgtttagggatttaggtattgttgtttttttgttttatatagatttttaaatatcgtttattatttatagggattaaggtatagaatatttataatatttatggtaaaatattttcgattttagtttagggaggtatttagagttcgtagttgtttatagatttttttattttttttgtgtttagagagatttttgttagtaaatattttttaagtattttttatgtattaggtttagcgatgtttttagtaatgttaggtgttggaggaaaattaagtgaggatggtattgatttagtttttagaggttaatagaaatggatttataaatttagtatggggttttttaagatattaaaagaggtaaaagattttataggaagagaggagggatagttatattgtgggaaatttaaggatgttttatagagatggtatgagataatagatttagaagaatgagggtaattttatgggaattgaaaggtgggaatggggagtggaagaaggtgagatttagataagagaaattggggtaagtaaagagaaagaaaatatatatatatatataaaaatatatatatatatatatatatacgaatattttaatgtatatataatatttatatatataaggtttagaaattttattaaatgttaataggttttagagtttttatttttgaggaagttagagttgtgtcgggaagagttaaggattataagttaggagtgatagtggtgggaggtaagaaattaaatttgttatttgggtttttcgagttttgtttattatatttacgtttttttttattgttatatttttttaaggaaggtttttcggtttagtttatgtttttttatttttcgttttttttatagttgtttttttattatagtttgtagttagatttagggtaaatgaatagagttaggttgttttgggggaagaaattgtttttgtttaagaaaaggaataggtaataaaagatatatttgtgtagtaatttttgtatgatttgaattagggatttatagtatttgatttttacgtattcggtgtttgtaataaaaatgtttttttgtgagtttttgagtttaaatgtttatttttatttatttttgttttttttattttttttttaagaatttaagtagtttttattttttttttattagcgtacgagggtattttgtatggttatcgtgagtgcgtggttaatgtgtagggagttagtgatattgggaggtgggatatatatggaaaaggttttttttgtagtttggggtagtcgggtttagaggaagaaaaaaagttaaaggggtaagagagaattggattggggaaagagtattttttattgtttttagaatagaaagaattttaaggaagaattgttttgtaaataagaggagagtggagaggagggaattggttagggggaatttgttaagagaaatttttggagatattagagttagaaagaagataaggtttataatgtgagtttaattttgaggtttagttgtatttaagggttattttgttttggagataatttaggatttttttttgttagatattaatttgatattttggtttgaagaagttttttcgtatttattacgggtattaggtagttttaatatatcgggggttgtatgtaggaggtaggggtttagagatatttgtgaaggtagaggagagttttattaattattgaatttgtttttaggttgtatttcggtaggttaaatgggtaatatatatgtgaaagaaaaggtttttttatttattttatttatttttttttttatcgggtttcgtagggattttatataatattaattttttaggtttttaggttttaatggattttgtaggtgattgagaagagaaagtagaagaggttgggatttagtatattttagattgtattttagtcggttttttttagttttttttaagttttagaaatttaaggataagttgtttgatttttaattttgtttttttttgttattttagtttttagagtagtttgtttttttcgtaggcgtttttgtttggttttacggttttttcgggagatgggagatttatggggtttcgattgtgtagaaacggagtgaaatttggggaggtttcgtgagtgttttagtttttaaaatggtggtcgaaaagaagcgagaggtaaatgaggtattaggagtgtttggaaaggggtcgagatttgttttggatagagagagagtatattaggatatgggggtggagaagggttattttttttgttttatttttttcgtttttaattagtataggtttgttattttaagtttttatttttttttataaaattttttttttttgagagttagagtgtatggtatcgatagatagcgttatggagttacggatattagggttttttcggaatagggtcggagtgtttggattcggcggtgattattgatatatgagagatagggtttagaaatttagggagatgatgggtattagcgcgtttaagagttagtaaagagtttcgttagggtcgcggcgatttttatttgtataggggttttttgtagtgtttatagttcggcgcggttaggttttttcgtttattttaaggtttgggtttaggattcgtagcgttttttatttttcggaggtcgtttcggcgcgcgtttattaggaggtttcgtcgttattttagggcgtttcgcggcggtagggattgaggaatttattaaattcgattttggaacgtggttttggagtcgcgcggcgtatgggggcggggtttcggtcggcgtatgcgtagtagttggttttggttttattttttttttatcggtttaaaggttgtagattagaggagcgagttcgtcgcgaaggtaaattttacggggaggcgttcgggatcgtattgttagttattataattttattaaataagaaaagttttgacgcgtaaataaaaaatatttgagttttgatgtttcgtttcgtttagtttcgttcgtcgaggttcgtgtttaagtttcgcgtttttaggagttatgtttttgtcgtttttaaaagcgtttgacgtcgttgtgttcggtcggggttattattatgagtcgtttggtcgagttttcgaatacgagtacgtttagttttcgcgcgtgggttagtagtagtttaaagtttatttgcgataggaattggttatataggatatttggggtcggtaggacgggaggggcgcggggagaagacgagaaagtgaagttcggagtttttattgggaatttttttagttttttggtggtagttttggacgcggtttgggtttgtttttatcgtaattttataaattaattttttatgtttgtttgtttaggggtttattttaatattagtgtgatttagttatatttagaaaggtttaatataaattattgtgaattatttttttatttagttaaatttaaagtgtattgatttgggacgatttgtttattatcgatttattttaaaataataaaaaattgttttgttagttttttttttttagtttatgaagtaaaaaataaaatgtagattgaattgtttgttttttttttggttaatgattaagatttggttattagaagttatttatttttagtgaatcggagtttgtttttttttagtttttagagtcggatttggtcggtgatggtggggggtagtataggtgtttgtaaggagtaagggttgattgtagggatttagaatattgttttagataattcggttttttgttttttttttagatttggatgttttttttttttttttattatgttattattagttgttagtttttgatattttggagtttgtttatatttgtttgagtattattgggtgggtttttgtttttaggaaatggattatttaggaaaatagataagaatggtatgagggttttagtaagaaggtaggaaagttatttgagttgttatttaatgttattggaatattagtttattttaaaaatttataatttttgttattaattttatttattttagtttagttgttattttacgttgttgtttttagtaacgtgggatattttttttttggtatattcgttttttttagtaatgttttgtttttttttttttaaaatagtagtagttattattttttttttttagtatttattgtatgataggtgttgagtttaatgttttgtttttatttttttaatgaattatttcggtaattttgaggtaagaattgttatttattagatgaggaaattgaggtttatagaggtaaaataattatgtttagtttacgtagttaggatgtggtagtgtcgaggtataaatttagatttatattttttttttttatgtttttttttttttaagggtttatttatttttatatttaaagtttttatttttttttaaatatagataatttattattatttattataatagatttagagttagttttttataatgtgatttttgtttttcgtagtttaagtgtagtttgtttttttgttttattttttttaagtgggaatatttgttgggttgtgatgttattggcgattgtttgttgtatattttttcgggttatttgcgttattattatgttggggaatcgatagagtattttagagaagagggtaatgagggtaatttgtagtttcgattttgagttagggatagaaagaggatgaggaggttatttttatatttagatttttttaagttttttttttaagtgttatgagaaatgttagagagttttgtagattgttaggtaaatacgaatataaattggtatttttttatttttaatttttttttttaggggttttttgtttcgttttattcgtgtaggtatatagtcggtaattggtttttacgataatgaaatttggttgatgtatagtgtttttagttttagagatatttgatgagagattgatggttaggcgtgtggggtagtaacgtcgagattttttttgaaaagaatagaaaggtagatgttttgttttagaagttattgttttatatttttttgtttgaaatattagattttttttaagatgtagaattttaatttttaatttttttttttcgagagatttaagtatttagttttggtaattgttttttgttattgttttaagattttatttttttttaaaggtaaaggtaatatattattttgttttttttttggaagttatttatttaggcgtttatatttttttttggaaaataagtttaaatttacgtagatgttgtaggaagtttaatagagaattatttatattttttatagagtaattttgaggaatagaggtttttagttggggtttaaaatataatttatttatttttaattttatatatttattttttttttttttatttttgttcgttttgtttttatttttatttttttagtttattttattgttttataatttgtttttttttttttatttttatattttttagttttttgtttattttgtttagagtagagaagttgagttggaagaggaaggagagaatttttattaggtttatgtttcggttttagggagaaagaggtagagataaaggaggagggatgggagggagataatgggaagaaagggatagagaagagaaaattagggaatagtttgtaggtaggagttttttagtgagatttgagaggagtagagtatgttggttaagtggttttgtttttttatttgggttgtttgtaaatattgtaatataaagtattagagttgagtcggggtgtttagtaataggaattggaagttagcggaagtaatgtagggcggttttttaggtttagtattagagataaagattaggataatgatggtgatatgtagagaaagattattatttttatttgtttatttacgtttttttttggtatttttggttatattttatttagtttgttttttttagttaatgttttttgattttgattagttttagatattattttttagggatttaaggagatggtatagtagagagttgttgtattttcggtttttttatttttttatgagtttagtttggttgaggagttgagttaagttttggttgatagttgtattgggggagtttattatgaagtgtaagattatttgaagaatagaagagaatagggagattatgttttaagggttatgggaagtagaagtataagtagagatatatatatttttaagtgtttattttttatcgtttttcggcgtatttgttaagggagggaacgtttcgggtatgtttgtttggttttagttgatttgtgttattagattaggttttttttttacggttaggatgggttaagagtaaggaattttggttaggcgtagtggtttatatttgtaatttttgtattttgggaggtcgagatgggcggattatttgaggttaggagtttaagattagtttggttaatatggcgaaattttatttttattaaaaatataaaaaattagtttggcgtcgtggtgggtgtttgtaattttagttatttaggaggttgaggtaggagaattatttgaatttaggaggtagaggttgtcgtgagttaagattatattattgtattttggttttggtgatagagtgagattttgttttaaaaataaataaaatagaataataaaaaaagagtaaggaattttgtttgtgttttttgttgttttttgttatttttttatttttatttttaggggttatgagtgggggatattttttatattatatattatatttggtttaatttatttttaaaggagtttttaacgtggagattataaggttttggggaggtttttaggagtttttttttttaaagtttaattagtggtttaataagtagtagtttttttgttttagtttaggaagagagagaagtgatatatttatttagaagggtaatgcggaggttttggcggaaaatggggttgaggatgaggttttggagttcgtttgggagtagttgtgtgtgttagattcggaggtcgtttagtagttttgtattttttttttgagttttggaatagaagtagagaggtgagtagggtatttggaaaataaaaaggaggtttataaaagttattatttttgtttgttttgaatttgttgatttttggaatattgttttatagagtgaaattagtatttttttaagataaattttttattgtattatttattagagttttattatagatattatatataattttttaagagggaagatatatttgaaagtaagattttagttgggaaataaataaaagggaaaaggtaatatgtagagttttttaaatgtatttatttttaagttttgtgatatatttattaatattttttggaagtgttttaaggaatagtagtttgggaaatgtagttgttgagaaatttgtatttggttgagatttatttgttgaattttttttttatttatagagttatagtagtttgtggtaaaggttgttttagaaagagtattcgtattatttagtttttagttaaggatgggagttttttgtataggaatagaggttaaaggttagtattagaagttgtattgtatttgtatttttgtttttaattattttttaaatattttattttattttagtataattttattagttttgttgttttggtttttatattttagagtaatttttaatttttgtttttagtttttatttcgattttaggttgttatatttttatttatgatattttattttatttcgtagattttattatatttttttgttatgaaggggttttttatttgaagatagttagatatgtggtagggtgtttatataatcggtttaatattttagggtttaggttttttaagaatttttgtagatttttgtattgtaggtgtattcggtttagtttttttgaaggggtgttttttattatttgaggaatgtaaacgttagaagtgtaattttattatttatgttagtgttatttttgatttttttaattgattttagatttattagtttttataataattttattttttttgtggtttttttttttatgttatttattttttttggttttttttaaatttgattaattttttttttttttttgtttttttattttatttttgttttttaattttagtttttttttaattattaagtgatagaattgttaattgtttagtgtttgtaagattattttgtattttaatgatttgttttatttttggttaaatagggataaagaaaattgagtttatattttttttttttattttattttggttagattagtttataagttttaaatttgttcgttttttttattttttattttttagtttatttttgttaagtacggcggtaattttttttttttatgttttttaaatttaaagttattttttttttttttttaagtttattttacgttatttattttgatttacgtttttcgattttttagtttttttttgttttttttttatttttcgttttttatttattttttttttttttatatttttgttattttcgtttttttaggtttttttattattttgtcgatttttttcgcgtatttcgagtttcgggtcgtcgtttaatcggagttaaagtttcgtattggtttttggagattgagggaaagatggtgaaaaaatgcgaggaaaagatggggaaagtaaagaaagattttataggtaagagtttagaatggagaatttagaagagaagggaggtaaggggaggagtggaaaagtgaagaggatgagaatagacgttgtatttttcgggcgcgggggatgttgggaattggagttttgtttttgttttttttagagtcggttgaagcgcgtttgattataaatttcgaaaggtatcgtggggaagtcgaaaggagaggagttggtttttaattgagcgaggggagatattagaagttggattagttggtttcgcgaaggtagaattaatttcgtttacgttgttaacggcgcgtgtaatcggttggagcgggaggcgggttcgggaaagtagaagtgtttggagggtttttttgcggaggcgcgttttggcgatttggtggtgagtcgagtgagtataattattttttataaaattgggataatatatattttaggtcgggcgcggtgatttacgtttgtaattttagtattttgggaggtcgaggcggcgaattattcgaggttaggagttcgagattattttggttaatatggtgaaattttcgtttttattaaaaatataaaaattagtcgggcgtggtggtgggtatttgtaattttagttattttggaggttgaggtaggtgaatcgtttgaattttggaggcggagttgtagtgagttaggattatgttattatacgttagtttgggcgataagagtgaaatttcgttttaaaaaaaaagaaaaggaaagaaaagaaagaaagcgtatatattttgggcggtttttacgagttaacgattaatacgatttagtgtattttatttgattttaagtatttagtaaattttaatttttgtttttattattttttaaatcgtttatttagaagatttagataaatatagtttttaagatattaattatttgttttgatttgatttatgaatttattataaaagtggaggtttttatttaaatttagaattatacgtttttttaaatttttatatgtaaattttgttatttttattttatagattggaagattggagttcggtaagattaagaaatttgtttgtagtttggcgaggtggtttagagttgtgatttttagttatttgggaggttgaggtaggaggatcgtttgagattaggagtttgaggttatagtgagttatgatcgtattagtttgggtgatagagggagatttttatttttttttttttttttttttttttttttttttgaaacggagttttttattttgttatttaggttggagtgtagttgtatgattttagtttacggtaattttagtttttcgggtttaagcgatttttttattttagttttttaagtagttgggattataggtgtgtgttattacgttcggttaattttggtatttttagtagagatagggttttaatatgttggttaggttagttttaaatttttgattttaggtgatttatttgttttagttttttaaagtgttgggattataggtatgagttattgagtttaatttgagatgtttatttttaaaaaaaaaaaaattaaaaaaaaaatttttataattagataggaagtgtttaagttgggatttgaagtatatttgtaagtaattagggattaaaatggtaatgattatgtaagattttttatattttgtagtttatttatgttttttgttgtttttgtttttttagtaattaatgttttaaaatttttaaagaatagttaaaaattgatagagtttttttatggtaaattttaggtaaggttgaaagataatttataatttaggaagaaatggttgatgaaataaataaaatataaaaagttgttataaagtaataagaaaaagaaatataatagaaagattgggatagattattgtttattagttagttttgtttagtaaggagtagtttaaaaaaaaaaaaagaagaagaaaagaaaaagaaaagaaagaggtttggcggggtggtttaggtttgtaattttaatattttgggaggttaaagaaggtggattattttagtttaggagttttagattagtttgggtattatatagaaattttatcgttataaaaataaaataaaataaaaattagttaggtgtagtggtgtgtttttttgcggttttagttgtttaagaggttgaggtagaaggattatttgggtttaggagattgaggttgtagtgagtaatgatagtattattgtattttagtttgagtaatagtgtgagattttgttttaaaaggagaggggaagagaggagaggataggggagaattggagaggggagaattggggaggggagaggaagggagggttagggagggggaaagaaggaaagagaaagaaagattggttaaagtaaaaagaaagttaaatagaatattagaaatgttttaaaaattaaaaaattggttgggtacggtgtttacgtttgtaatttcgatattttgggaggtcgaggtgggtggattattcgagattaggagttcgagattagtttggttaatatggtgaaattcgttttttttaaaaatataaaaattagtcgggcgtggtggtaggcgtttataagtttagttattcgggaggttgaggtaggagaatcgtttgaattcgggaggtggagtttgtagtgagttgagatcgtattattgtattttagtttgggggataagagcgagattttgttttaaaaaaaaaaaaaaaaatttaaaaaattagttaggtttggttttgtggttttagttatttaggaggttgaggtaggaggattgtttggatttaggaggttaaggttatattgagttgtgattatgttattgtattttagtttgagttatatagtgagattttgttttaaaaaaaaaaaaaaaaaaaaagaaaagaaaagaaaagagaaaaagaaattagttcggtatgtatatatttgaagttttagttatttaggaggttgaggtaggaagattggttgagtttagtagtttaaggttgtagtgagttatagttatattattgtattttagtttggtcgtagaattagattgttttttaaaaataaatatataggttaggcgttatggtttatatttgtaatgttagtattttgggaggttaaggtgggtggattatttgaggttaggagttttagattagtttggttaatattttagtagaaattttgtttttattaaaaatataaaaattagttggtatggtgacgggcgtttgtaattttagttatttgggaggttgaggtaggagaattatttgaattcgggaggtagaggttgtagtgagttgagattatattattgtattttagtttgggtaagagtgaaattttattttaaaataaataaataaataaaaataaaaataaataaatcggtcggaggtagtggtttatatttataattttaatattttgggaggttgaggcgggtggattatttgaggttagaagttcgagattagtttgagcgggtgaaatttcgtttttattgaaaatataaaaattagttagatatggtggcgggcgtttgtaattttagttatttgggaggttgaggtaggagaattatttgaatttagtaggttgaggttgtagtaagtcgagattatattattgtattttagtttgggtaatagagtaagattttattttaaaataaatatataaataaaattaaaatataaaagtttagtaaaaaagaaattaaggattgataattttaatgttgattagggtataggagtatatttatatatttttgttgaaaattgaggtcgggtttagtagtttacgtttgtaattttagtattttgaagggaggttaagttaggtagattatttgagtttcgaagtttgagattagtttgggtaatatggtgaaattttgtttttataaaaaataaaaaaattagttgggtatgagggtgtatgtttgtaggtttagttatttgagaggttgaggtaggagggttgtttgagttttggaggtggaggttgtagtgagttgagattatattattgtattttagattgggtaataaaatgagagtttgttttaaattaaaaaaaaaaaaaaaaaaaaaaaaaaaaaaaaaaattgaaataggtatattttttttggagggggtgaggggatagagttttatagtgttatttaggttaaatgtagtggtataattttggtttattgtaatttttgttttttagatttaagcgatttttgtgttttagtttttcgagtagttgggattataggcgtgaattattatgtttggttaatttttttttgtatttttagtatagatagggttttatcgtgttggttagtatgttagtgggtatggtagtttaaaaaagaaaatttttgtgatagggagtttatgattttttttttttaggtagtattttggagagaaagaatagagagttagggttaggcgtggtggtttatatttgtaattttagtattttgggagatcgaggagggtggattaagatattaggagtttaagattagtttggttaatatggtgaaatttagtttttattaaaaatataaaaattagtcgggtatggtggtaggtgtttgtaattttagttatttaggaggttgaggtaggagaatcgttttaatttagaaggcggaggttgtagtgagcggagatagtgttattgaattttagtttgggtgatagagtaagattttgttttaaaaaaaaaaaaaaaaaaaaaaaggaatagagagttaggagtttatagatttattttttataggttttattgttgattgattgttattttgggtaagttgtttaatttaatagaatttttttttttgtgtaaagtaattttaattattttatatattgttgtattaagtaagatataatatgtcgtaattttaatatttggtatatagtgggtgtttagtaatatattattattattattgtaatttttatttattaattttagttttagttttgtaattatatagaatttatgttagtttattagatatttgttataatttttttttttaattaatattgagttttgtgttttaagattttgtttttgtgtaatttatagtttggtgggaggggtaggtataaaaagatatgtaaaattatatacgtagtaagtgttataaagaagagatttatgttttttgagattattagtagggaatttgatttggttggggaagttaggaaagattgttgaaggataagtaggagttaataaggtatagattgtagggaatattgttttaggtgagggaatagtatgttacgaaggttacgtggtaggaagtattgtggtttattgggtgaatttgaaagaaggttagtggtttatagaggaaagtaagcgggtgggggaggacgttggagaggtatgtgggggttaattttggttagaaggattttgttttttattttaagattaatgaaaagttattgttggatttgaaatgaaggattagggttagatttgtgtgttttaaagataattgtggttgtagggtggaaaataatttagagaggagtagaggtagatttgggtgatagttgggagattattgtaggagtttaggtaagatggaggtagtatgtgttaggagggcgatggagatagagatgataagttttagggagatttgggaggtaaaattaatagcgttttgtgttggattggatttgagaggtggaaggtaagggagaaggagttcggggatgttattttgtgcggtttgtgtagttaagtggatgatgttgttatttattgagttagtagattgtggaggagaagtaggtttggataagtagggtttgatttttaaattaattgtaggtggggttgggtacggtggtttacgtttgtaattttagtattttgggaggttaaggtgggcggattacgaggttaggagtttgagattagtttggttaatatggtgagatttcgtttttattaaaaatataaaaaaattagttgggtatggtggtgtatatttgtaattttagttatgtgggaggttgaggtagaagaatcgtttgaatttaggaggcggaggttgtagtgagttgagattgcgttacggtattttagtttgggtgatagagcgagattaggttttaaaaaaaaaaaaaaaaaaaaaattaattttaggtgtttttgtttgaaagatagtttagagatttgggttattaggtttattgtcgtggtttttatcgtttattattttgggatttggtttttaaattttaatttatcggtatataatttaaattatagtgtatagtggtttgatttgtgtaagttttagtaggattattagattcgggatttaggttttaagggtttattaatttaattttatattgatttatttttattgtgatttttattatttaattggtttattttgtgaatattattaattaaaattttagggtttttattttatatgaatggttattaagatgggtttgttttgttttatttttgtaattgatttttaattttttttttgagatagggttttgttttgttatttaggttggagtgaagtgatgtaattatggtttattgtagttttaattttttgggtttaagttatttttttattttggttttttgagttgttggtgtatattattaagtttagttagttttatatatatatgtataaatgggggttagagtgtgttatgttgtttaggttggttttaaatttttaggtttaagaaatttttttattttagttttttatagtgttgagattatagggtatgagttattttattggtcgattttttttttttaattaaatttgaattttttaattgtttttttggtggttgtagtttatttttttaagtttttgagataattgaggtttttgattttggtttttggttttggtttttattttaataatttattttttatttttagtggggtatttgtatatttgattagtataatttagggatttttttttgggatttttagattttggggagttagatgggttttagaatttgggtaagaaaaagaaattatattttttattaatttttaatagaagtttagtattttttttaattatgaatatgggtaaaattattagtagtattagtagtatttgtgatttgttattaattgatattatagttatttttatgttttattgtgattgttgtagaaattttaaatatggtttatgtttattagtatttggaaaatgttagtttattatatttgtttttagattttgttattaaatatatgaaaaagaagtatattagttttataattttttagtattttggtaaattgtttttattggttttttttataattttatatattttatgggttttgttgttgttgttgttttgtttttgagatagttttattttgttgtttaggttggagtatagttgtgtgattttagtttattgtaatttttatttttcgggttttaagtaatttttttgttttagttttttgaatagttgagattataggcgtatgttattatattttgttaatttttgtatttttagtagagatggggttttgttatgttggttaggttggtttcgaatttttggttttaagtgatttatttattttagttttttaaagtgttgggattataggggtgagttattatgtttggtttattttataggttttaaaatttaattttgaggaggatttagtagatttttatagattgttaaaggcgtttatggtataaaaaaggtttagtatttttggtttgattgtattttttttaggtttttattagagtatttttttgagttgagaaggtttatgtatttagatatttatgtattttttgaggttttataggtaaaggtttggattatttagaaatagaatataatgttgggtaaaataggtgatgggaaatggaatgaggaggtaggaaaaaaggaagatgggaagtgggttgggaagtgggtttagagggaggtgtaggaggtagagttattaaatttttaaggaatttatttatatagttgtggaaaatttaatttttattattatttgtttagtgtaggggattaaaattgttttaagttaggtttatatattagtgtaaaaatttgtgtttttttttttaaaaatgtataaattttaagtgattatagaaaaattaatgtggtagttatattagagatgtttaattttaaggttatgggtcgttgttttttttttttttttaattttaatatttattttatagaaacgtataggtttagagaagttttagttataagattgtaagtgggaagtgggggtgattgagggttggggcggggttatttttaggtttagtgttttaggtgatggaggaggaagaagtttaagttgaggataagtataggagtaggtataaggaaatattttttttttttttttgttttttttatttttagatttttagttagtggggtttagtgtgtgatagggagagagaagttgggggcgtagttatttttttaggaattagtgttgtttagtggggtttaggtgttttaatgggttatgtttagtgtttattttatatttttttttatttttttttaagggatggttagaggagggtggagaggattttatttataggattagttgggtgggcgataggggtttttaggaaggaagaataggaaggggatatgagagtgtgtttaggaaggggagaaggggtattagttttttgggtgggtttagtttatttgtagttttattgtttttattagaggtgatgggttgtcgggaggggaagggtagaggtgttattgtgtttttttgttttagtgttattggttttttttggatcgttttttgagggaggggtagttggatgtgtgatttatatcgtgttgagtgtattttttgttaggaatcgatgtagttgggaaaagggtggtcgttgtttagattttcggttttagtatcgaagtattagtttatataggttttgcgggtaggtaggcggtcgggataggtatatttgtattgtggtagtgtggatgagagttagggaataaatattttttagtttttaagatgataattttgttttttttgtttttcgtttcggatttatttttttttttttttattttgatttgtcggttttggtttcggaagaattttttcgcgttttcgatgatttgttcgtcggtgagttgtttaaagggttgggttttatagagtattagtattttttatagggttatattaaaggtttatacgttattcgtagtcgtgaattttttttgggatgtagagaaggtagtaaaaatagatagggatattaggtaacgtagatttttttttttttttattggaagttttagatttattttgggttttatttaggtttgattttttttgacgttaggttttttattttttttcgttggttattttttttaattttttttttttgggttttgttttttttttttatgttttggttttttttttagggttttggtttattttttttttttgttttttttttttttttatttatttttattttttggttttgattttcggtttttttatttaattttttttatttttagttttttcgtttaattttattttttgagttttttgttattttgtttttatttttagtatttatttttggtttttggatttttgtttattatattgtagtttttgttttttttagttttttgggttaggagaattttatattatagatgagattttgtaaaatgtaatttagagaaagtgtgtgattgatggagattagggttgtgagtggcggttagtgtttttttatttgttttgttttaatttggttgttttcgggttgtttattatgaggatgtatttttaggttatttagcggatgggtagtattgttcggttttgtatacggtaatagtttttagtatagaggtttcggtttatgttaaagtttgcgattttgatggtgaaattttttttaattaggtagtttcgcgtggttaggtttcgatgtataaagttgagtgtggttagatagcgtatgtcggaggcgatttgggttgttatatgtagtagtattgggtagttgagaagggaatcgatagaaggttattgggggtagtttcgtagatttttatttaggagaggagagagagtttatttttcgggttcggttattttggttttttatgtggaggtggaatgtttacgtgaggttaagggttattttttttttaattttttaggtttggttaatattagggggttttttttttattgtgttttttaatttggatttagaggggagtgagggtgagagaaagtagaagggacgttatggtagggtttaagtttttttattatttttgtatagttatttttagtttttttgtttatgtttttgggttaatttgttatatattttttattttaggtttttttggaatttttttttttttttatttttacgtttttttttttttttttaggttgaagcgaggggagaggaggagattttttgggggaattttgagtaaggtttagtttgggtaagtaggtatttgatggtgggtttttgcgtagtttgttcgtttttaggggttttttcggttgttttgttttttagttggtgggtattgaggaattggttgaggtcgtcgttttttatgtagttagtaattatgtagagggggtcgttttgtatatatacgtttagtagtcgaatgatgtttgggtttttgagtttcgatatgatttttattttttttaggaaattatttttggagaataaggagaagttgaagaggaatgtcgagtgggcggtttgtattttttttcgcgtttttatttttttgttttattttaggtagattaggtatttttatttttagcgtatatgtaaatttttttttagagatgttatttttttgttgggttttgttattgttttttttagatggttttttattttttacggttttttttttttttttttagatgttatttttggtttttatttggtatttttggtggtatttggtcgtaagattttgatagttattagtaaagggtgttttttacgtatattaagggggaaattaagattaattagattttgagggttgtcgattttatataggtgtatttggagaaagaagttcgtttgttaggcggttatagggttaaacggattaatacggttataaatgattaaggtttttggttagggggatgtataggtatggtattagagtatataatagggttagatattgggtaggtattttttttatttttttaaattggttttcgttaagtttttttttgaagcggagtcgagatcgagggaaatttattttggggggtttattttcgattgtttttgggggtagtgtaggtatagtataggtgttgttttcggtgacgttttgtagggtaataatgttagtttcggtataatgggggacgttgttttggggaggtgggggtagaagcggggcgtttggttttttaggttttatatagtttttattgtaggttgtaggggtgaggggaaagaagataggacgaggtattaggaatagtttaagagttatagttttttatattttagtttttcggagggttttgtgtttttcggttgagtgagagattgggtttatgttgtatttttttagtattttatgcgttaattttaaattaggaagatattggtatgggacgagagttagttattttagagttttttaaggtaatgaatatggttgagtaaaattgttataaagttttatttttttagggtttttttagggttttttaagagattgtgagataaattttggttggaagaagaatttttttttaggaattttttcgttttaggatggttttagtatttaggtattttttattttttaaatttttgtttcgtttattatagtttttttttttttatttagttgttttttcgtggtttttagtttggttttttttggggttaagtttttttaatttttttaatttaatatattaagtttaataataagtagagatagaggtatatagagaggagggagggtaatagttgtttatagttttaatataagttgtttatagataggagaggaagtagagttgtttttttttagttttggggaaggggttataatgagaaggtaatattgaggagaagaggggtagatggaaagggttggggtatgagtttttatttttgggattgtagagagaggatatatgtgagggaaagggtaagcgttcggggtgagagttttttttttcgtagttttagagagagtggagaataaaggaggagttattatagtttggggttattatagtaattttttgtttagttttggagagttgaagagatggcgtggaagaggaggagggagaagagttggggattagtaagttttttattttttagtttaagggggggattttaaaaaagagtaagtagtagtagagatgagttaagggtataagagttttttttttgggagtttaggagagtagaataggttatagtggggagaggaggaagtgtaaggtgtgagggtttttttttgttttagtagaggtatggggagtttggcggagtttaggggtagaggggtttattttgggtgttggtgggtttggtttaggcgggtgtgggggggttcgggtttcgagggggacgggcgtaagtggttagaaggaggcggtaggttggattggagagtagtaacgttgtcgggagaaggaggaggggaaatacggggaagggatgagatttaaggttagatagatagggagattttgaatagggtaagattagggttgatgggatgattgtattaagagatagataggataaaataaggatttgtagagtgacggacggttggttggataatgaatgtatggatagatgggacgtatgaatagatggatggatggtaaatagatgttttgttggatggatggataatagatggaaagatggatgtgtgaatatagatggatagatggatgatggatatgggtgggtggatggatggatgaatagatttatgaatatagatagaaagatagatgatggaagattgatggatggatgtaaggatgtatgattatggatggaaggatgggtgatggaggatagatgaaggaataaatatggtgagtttaatataaagtaaaggggttagggagatataatgagagggtataataaagatagagagatgtttgtgggatatagataagatagtattacgggggattatgggtaatatatggggaatttttgagagagattatatggtagggataaagagtgatatagatagtaattaggggtatagaaagaagaaaataagtggaaattggggaagataggaaaaaaagagaatgggaaagggatataataagaaaatagtagagaggatagaggtgcgattggaataaggtaggttttattagagttattggggatatagggagcggagtggggcggatttttacgaggtcggggtttttggtacgggggtggttttttaggatttgggcggttgttgatgaggatagtgtttttagggatagagaggtgaatcgttagttttttttttaatatttttcgtttagttttgttatagggatgggaggtattattcgtgttgtttagtatatacggtttggttttttgttgtgtttatttttgcgtttttttttttagtttttataagagttttatagttgtggatattattagtattattttataggtagagaaagtgaagtttaagagtatggaggtaatttttttgttttataatgagattttaatttttatttgtttagtttataattattaatcgttttttttttgtttgtttgtttttttgagatggaattttgtttttgtcgtttaggttgaagtgaaatggtatgattttagtttattgtaattttcgttttttaggtttaagagatttatgttttagttttttgagtagttgggattataggtattagttattatgtttggttaattttgtatttttagtagagatgggattttattatgttggttaggttggtttcgaatttttgattttaggtgattttttcgtttcggttttttaaagtgttaggattataggtatgagttatcgtgtttagttattaattttaatgtatattattgttattggattttagtcggaagacgtggtttggggtgtgttagacgttttttttttgtttttttaattttattttttgtttgtttttattttgtttttgttttaaggttgattagtgtatattgtattaataggtttggtttgggttagttagagaggagtttagtaggagtttggggtagaaagtgaggttagggtatttatttttttaggttttttttgaggggtagatacgggttagttgtattttaggattaaagtttattgtttttgttaaggtgttttttttataggtttttttttttgggtcgtggtatttgttttttttcgttgagtagatttagagttggggagtagttttttttgtgagttttatattttttttgatatggtgtaagtggtttttttattaagttttttttttgggatgttagtgggttgtgttttgtaggttttattggacgttggttcgtgttggggtttggttttttttcgttattttatatgttacggttgtgtttattttgttgaggagtttgcgttagtgtagtcgttagagtatgagggtaatgatgagtagtaggagtaggatgatggttattaggtagtcgatgaggatggcggtcgggtttttttcggttttggttacgggttgttggtttttgggttttagttttggtggaggtagtagggttagtattataggagggttttattttagttaagggggaggtttagggagaagggtgtagagggtttatacgtttatttaagattgtttatttaagttgttgaagttggtgggaggtgggttaggcggttattagggggttggcgggaaggtgttttttagtgtcggagaggaattgtttattatatttggggagaaggaataaaaagaaaggagggaggtaaatgaggaggagatttaagggaggtagaggtagtggattgttgtgtaaaggagtagaagtatgggtgatttttaataggtaattattgattagtgggggttgggggagtagggttttggaatatttagttgtggtgggtgttaattttatagttgttggattgtggggaggtggaggataggtatttggaggtttagagaagaggttattttttaattaatatagaagtattttaatattttaataattagtattgttatattggtttaataatagttacgggtaaggggtttataaaggaaagatggatacgtagagaataagaggtagaaaggggtttaagttatttggggtatttttaattgagaagtttcggtgggtgatgggtagatataatgtaaggaatgagtattttagggatattgtagggttaggaatgaaattagttgttaattttagggattggagattgggttattttagggtttattagagatgaaggagatttcgttgaagagtaattagggtttcgtaaagaggaagcggtattgtagaaagcgagttatacggtcgttaaggggtattgagatagttcgggttttggggttttttaggttgttttttaggttgtggcgtatgggtttttttttttaggttatggtagggttacgtcggaagcgatattttatttcgttaggtagacgggtttttagcgtgtgtatgttgttatagtggatttggggggaagggaagagggtatagggttaaggttaggagtggtgggggtattttaacggtattttgtatggttttagagtttttttcgagagtcggatttatttatttgtatagtttggaaggtttttagtcggttaaatttaaattttatttttatatagttattggagaagttgtggttgttttattttatatagttatagtttggttagattcgtagtttttgattttttttaaagttatttagttttattatattatttgttagttggtttagatttttatattgtagtttggagaagaggggattaaggaagaggaggttggaagggaagagggttttgatatttaggtattttgtttcgttatttttcggtatagtggtatggttagtttggtttttatttattagttttatttttattttattttatatttatgtagttggttttttttttttttttattttattttagtattataggtattttgtaggttatatttagtataaaggtattatttttaaggggtattattttaatttatgatgtgtatatttattgtagtaatttttaataatgtgtgttagtaaaggggtgttttttttatatagtgttatacgggttagtggttattttagtgttattttttgaggttttatttaatttatttttttttttagtttttttattttattttttattttatttattagtttttttatatatatatatttatatatatatatatatatatatatatatatatagtttttttttttattttaaattttatattttgtaggggttttttttattcgtttacggtatgttcgttataggtggagtcgttgaggtatacggttttagataaatatattgtttgttttataggggcggtgtaagataggagtttatttggggtagggtgagaggatgggggttagaggtattaaggttttattttttatttttgtattaggtttgggtaggttttaggtttttttttgtatttttttattggtttattggtatggaggagataatgttggttagttttttttttagagtgatagttttttagtaggagaagggattttggatgtttattttttatattttttattttttagttttttgtttaggaaatagatttttaggaagttgagttatttatttttttagaggtagttatagagttttattcgtagatagacgtttatgattcggttagttcgggggtagaagcgaattagtcgggtaattatggggggtttaaggttttttagtattatttttttagggtttttattgtttgagattatttgtgggttaggaaatagggggtgggtgggatggagtttaggttagattttattttttatttattagttgttttttggtttagtttatagtggttatttagagatttatgaggggtggtatcgagtatatagtattgtggggcgtagttaggtatgggtgaaatgaagatttgtagttgagatttttggttttgtcgtagttttgatgttttatttttagattttaggtttagttgtttttttttttttgtttggttttatttatttgtttttaagtttattattttattgtgtttagattttttttaatttttatagttttgtatttttgttttagttttttttttattttagtttattttttttgtttatttagtagaagttggttgagtgttcgttttgtgttaggcgcgtttttagtggtgaacgttattttttatttttgtaggattgagattttagtagggaaaatagttgcgaagaataagaggtaggaagtatggatagagtagtgaggtgggtggttagaaaaggttttttaaggaggtgatatttggtagagaattgaatggagtgagggagagtttgtggttatttaggggaggagttttgtaggtatagagaaaatgtttagaagttgtgggaacgagttttggtttgttttagtaataagaagaaaggtagcgtggttaaggaggcgttaagaaataagtgatgtaggtaggagttaggttaggttgagtattttgtattagttagggatttagtttttgttttggtagagtggaaagttagtatgggggtgttagttaggtgtgacgtatttgatttatatgttttaaggtttattggatgtcgtttttttaggtggagatttgattttaggtagaaaagggtagaagtagggagacgcgtttggtatttattgtatttatttaagttggagatggcgggtaggtggtttagggtagtagaggtggagtggtgaggagtgattggatttaggaatattatggaggtagaatagacggggttgttgatgttttggaaggaggtgagagaaaaaaaggaattaaggatattattttaatttatagtttaggtaattaggtaatggtgatattattttttgagttggagaatgttaggggaggagtaggtttaggttgggaatgggaattaaatttagtttgggaagttaaacgtacgtttgagatgtttattagatatttaggtggttggttatagtgtttgtaattttagtattttgggaggttaaggtgggaggattattgagtttaggagtttaagattagtttgggtaatatagtaagattttatttattagaaaaaaaaaaaaagatatttaagtggagaaatttaaaaggtggttaggtttataatattgtttggagtttagttgagaggtttagtttggagatgatataaattggagagtcgttagcgtataggtggtgtttaaagtatagttggaagtgaggagagttaattttttttgggtgttgtttttgttagttttattttttgattttagcggtttttttagtttatttagcggcgattatttcgggagtaacgtagtcggtagtttcgggagaattttttgtttaggttttcggtatgtcgtttttgggtgtttattagagttattaggtgtagtcgttgtagatttatttgtaagtattttttttttttgggaaatatcgattttgcggggtattaggttttattttcgttattgttttttaatttgagggtgaagaggggtatagagaatatttggttttaggtttgtttttatttttagtatttaaattttattttatttgtttttttagtttgtaggggttttattggtatgggtagaggggttggaggggaagtagaggttttaggagtttttttcggggtagttataagtgtgttaggtgtgttaagtatttgttgtggcgggcggtagtggaatttgattaggagttggaagtagagatgttattgtttgggatggttcggttttgtatgtttagggtatagcggtatttggttgagtaaaaagtaggtatgtaataggttaaggtttttaattttttattttttaagttttggtttttagggatttatgatttagtttttttattaggattaaaatgtttttttatgttagtatttttatttgttattaagagtagtagtagtaaagatgatagggtttttggttttatagtttttgatttttcgggtttaagggggtgggggtagtatttttgtaggggataaaatgggtggtgcgtaagttaattaggggattgagttatagttgatagtaatagatagaatgggtcgttttggggataataatagtaaaataataataatagttattgtttaatagtattagttatatttttagaatgttttttttgtgttagatattggtttaaatttttaaatagaatttataattttatttttatagttattttataaggtagatattattattatttatatttaatatatgaagaaattagggtagagattagttaaataattttttaaagttttatttttttaattaggaatgggtaaaatatttttataaataacggtttagaataaataataagtgtgtaaaaaatgtttataatatatataataggaaaaggtttaataattataataaattaaggttttttaggaattgataagaaaaaatatataagtaatttaataaagaaatagttaaagaatgtgaatagttattttatagaaaagtaaagttaaattgttaataaatattttttttaatggttaaatttattagttttagggaaatattaagtagattgataagatatttttttaaggttgtaatatataaaagtggtagaaagtgatgaaaagggaggtattatgtttaatggtagaaatgagtgttattttttatttggaaagtaatttagtaatgtttattataattaaaaatgtatatttttttcgatttagtattttttcgagagagaagtattaggaagtaagaatatatgtgtaggtttgggtttggtggtttatgtttgtaattttagtattttgggaggtcgagatgggaggattatttgaggttaggagttagagattagtttggtgaatatagtgagattttatttttttaaaaaaagtgaaaaataaaaataaaaaagaagattttaaagatgtttattatggtattttttgtaagatataaatttgtaagatatgtgaatgtttataggggataggttggaattaaaaaaaataaggtttattgattattatgtagttatgaaaagtaataaagaggtaatatatttttaattttgtgtgatttttatgtatatttgttgaatatgaaaagtaagtaatagaagtataaaaaatattttattttttgaaaatagaataaataagtatttatgtttgtatatatatttgtgtgtacgtttagaaggagagaatatataatagaatataataatagaatataatataataagagttaatatgaacggggtaaaagaaaagtaaatttaaaaagataggttgattgtattatttttttaaattttgtaatataaatgtatttatgtaaaattataagatatgtaaaagaatatgaaaattattttgatttttaaaaaataaatatgttttaggaaaggttgggtaattttttgttgaggatatgatagaattaaatattagataagtttggattagtttattttgttgtttttttatataggagtttagaattttaagagaagggtagaggggattttagtattttttagttttattgttttttatagttttttaggtttagggtggtttttggattattagtaatatttggaagtatggaagaaattagaattttaggtttatttttgatttgtttaattaaaatttgttttttaatataatttttaggtgatttgtgtttattaaagtttgaaaatttttattttgttttttaggtttaggaagtttattttatataaaattattttaaatggtatttttttataaatttaagtaattattttttttttttttgttgtaggaaaagttattttaatttgtattggttttagagttttgtattgaagtttttaggttttggagttttgagggattcgattgttattttttattaggtttagggtattttgggtttagttatttttgttttgtttttttgagatttagatatttagtttttttagtttttatttttagaaggtggttgtttttgagggattgaggaaaggttgagttgttttggagacgagggcgggtttaaagataaggaaggtaggttattttaggaggtaggaggagtgggggatatttttttatttttttgtttttttttagttgtttttataatgtattagggtaggaatgtaagaggtagttgagattttagagttttgaagtagtagttgagggggacgattgagttgtggggggtatttagaggttagaattagaaggtattacgtttggttttttagggtttagcgtcggggagtaggttgttagagttttaggagattggtttggaatttttgggtgtcgttttttaattttatttttttcgggaatagcggggtttttgtttttttaagtaatttttatgtttattttagatgagttattagagttatatagagtcgagaggagttcggggtagagatataaaggtaggtagaggatacgaggtaggcggagatagagcgagagttataatgtaagaggtaaatagagtaggtttagaaatacggggtatagagttaagtagaggaatacggagaagtatagagacgtttgggttgtttgttttttaatatttttagttattttatttttttttattgggtttttagtttatagttagagatttagagggtaagagaggataagtttagaagattttttttaattttatttttttttattttattataattaaagataaattaggggttaggttattttgttttaagttttttacgttttttttttaatttttaagttttatttagataatatttatatagttttgtatatatatatacggtgaaatatataaatttattgaattggttgtaaatagcgaggttaaatgtggtatgtatatatttattttttagtgtttttgataatttttatagagtttttgagatagagtaaatatagaagtttatgtatatattaattcgtttatattttggtatttttttaagtttaattttatcgtttagtgaatagttatttttagatatttgtgaatatgaaatgatagatattatatgtttttgtgattaaaagatagtatgagatatatatattcgggtttttgggtataggatttttagagaattggggtttagtttttaatatatatgggtgattaagttagagggacgtcgagggggtagggaataggtgggcgttgggtgggaagagtggtaataaggataatagtttttttttgtttttttatttattttttttttatttgtttttattatattatttagttttggatatatttataggtttttagtaatagttagcgagtttgggcgtttgtttttggttgttggaagcgttgggaagaaatgtttagttaagagttaggtatgggggggtgggattttgaagttggcgtttatcggtagtgatatttttttatgttagagttaattgattatttagtcgggaagagtggtgttattggtgggttagagtggtagtttttttttttgttggattgtgattagattgattaattgggtgttggttgagcggaggtttagtagttagatgttcgtagggattggttaggtggagggtaggcgatagatgagttgatttagtggggttgtataggagtattttttttcggggtttagttttttcgtattgagtgagaggggatttgttttaaggttggaggtttaaaattttttttgggaggttacgggttttatttttatttagttttcgttttcggtttttagacggtatgttagagtatcggggaggcgggtagggaggtttagaagagttggacgattaagtatggttcgggacgttttgtttttttcgtttttcgttttgtaggcgtcgtcgcgcgtttttattttaagagttttaggttttcgttcgcgggtttcgtcgtcgttttttttattttttatcgtttttttcggtagatttaggcgttcgattcgggagcggggttttttcggcggcggggcgaggggcgggggaggcggagggagttaggagtcgggagtcgggagcgggaggcgtcggcggggttcgggtgtcgggaggcggttttcgagagtagttgtcgggggtttgtttcggggagaggagttagggttggggcggttcgggtttaggcgtcgtttttttttcgtttcggtttttttttttttttttttcgtttttcgttttttttttttttttcggttttttcgtcgcgcgttcgggttcgtagtttttttttttttttttcggatttagtagttttagtggtttttacgttcggcgtcgagttttaggtttcgcgttcgttacgtttatttcgcgcgttagcgttcggttcggttttttttaggtaattcgttcgttaagttcgtttgggcgtttttaggtcgtttagtcgttcgcgtcgttgttttcggtcggtttcgcgtttagttttttttatttattcgtagtttattttcgtttttttaaacgagaatttttaaagttggcgttttagggggttggttgtagtttcgtttagggtttacgaggggaagacgttttttttatttttgggatcggtttttggtgggagaggtaaaggggagtagttttagggtatagaggaagaagtaggtttttataggttcggtttagtttagttgcgggagttagtttagagaagggagtagagtttaggttttagggtttatttgtttagttaggttttagattgtttttttttttttattaatttttgtttttttttcgtagtttgtgcgttttcgtttttacgatttaatttggaaggttttagattttgaaggcgggtttatttttttttttttttttttttagtttttttttttgaagggcgttttaagggattcgggggtttagacgtttaggttttgatttttttgggtttttaacggagtggagtgggagggggatttaggagtttttagggtaagttttttttaggtttagttagttttggtcgtagtgggttagagggtttgattattggttagaagaggttaaaaatgaggttaggataaagttgagtggtcgggaggaggaagaagaggagtaggagaaggatggaggtatattgaaaattatatatagttaaaaggaaggggattaagagatttagggaagatgaaatagtgagattgagtaggtaaagtaattgagagagttattgggtagaggatggagcgggatagaatagtttgtggtgggaggtgttttttttttatttagtattattttagttttttatttttttttatatttttatatttgtttattatttagataatgttacggttataggaagttttcgttttattgtatattttcgttttaggaattttatagtagataaaaatatattttgtttgtagttttagataataattttaagaaagaaatacgaagttttaattagataagtatataaaagtattattaggaagaagttggtttttgggaaaggtcgaggtatatatgggtattagtttagaagtttaaggacgttttaacggttgagggatttgttaatagatagttttagggttattcgaagagtagttttttttcgtttttttgttttattaagtttttagggatttatttttttagaatatttatttttttagagaatagtagttggggaatttaggtttaggagacgttggattgggggtggggttagtttgggggtggggttaaggttttttaagttattttatttggtagtttatagtttttttttttaggagttgtgttttgggaaagttttaataggtttgttaggtaagttatagtttgttatattttggtgggatattttatattttaggtttacgttgattttagttaagtggtatggtagtgttagatagaggggtttattggggagagtagaaggagttagagagttttgaaatttttgttttttttttttattgttttaggagaaatttttagtggtgatgtttatttcgttttagttttaggttggaggagtgggagggatgtaaggttggggtttagtggagttaagtgataacggaaagggagttggagttagttggaatgcgggattcggagtcgagatttttaggggtttgagagggaaattttagttattttggggtttagagagtagtattaaagattaagagggtttgattatttattcgtggtttttagagtttattttatattttttgtattatttcgaattttagaggttttttgtgtttttgagaatttttaaatgattttttattatttttttttattttgggttttttttttttttaagttagtggtagtttgttgtttaggaaggagaggatgggaaatagttgaaaaaatgtgaggagaggtacgtaggagaggggagaaggtagttttaggtttgtagattatttggttataggagggaagtttagtacgattagcgagcgagaggacggattagatgggtttttatatatatattagttgtagttttttttcgggagttgtagttgtttttggaggagtaggttgggttagtagttggggagagtaagaagcgacgggtggggggtagggtgaaggagtgtataaggttttgggtgtgagttagatttgatgttattgaataaattggaaattgaggttagggagcgaaggaggagattgagatgacgtagttttgggagagagatgaaatagtttagttgtggttggggaagaaaagggtaagggattagaagagggagaggaggttgatggttagatggggataatggtgagagaatttttagagagacggagatggattgaggttaaggttaaggagataggtttgagagaggaaaaggaggatgaagatagggtatatatagtaaaaggtgggaagttttaggggtttagaggaggagattgaagtttgggaagaaaagggttgaattggatgaaggaattgaagtggattcgggaaggaaatagtgttggaaataaatttttaagagaggaaggtagggaattgaggaggtttgagagttgggtagatagattaaggggataagaagtaaggataagggaagaaggggttggagtgaaatagagagtggagggaaagaggagggagattggggcgtagagtgtgaagttaagggatacggggagatgagaagtataaaaggttgagaaaggaagaggtatttgcgggatagatggggatatgaggattaaagagagaatttaatttgtttttggataacggtttttttttggggatattttagttttttagtttatttattatattatggtatttaattttattttttttttttttttttttttttgttaggttttgggtcgtttttttttttttaatatatttttagtttttagtcggggatcgtttggtttttgtttataaggggagggtttagttttagtgtttatttttgtttttttagtttatttttggtttttttttttttatttttagtttaggatttttttaggttttagttattttagttttaggtttttggggtcgggtttggggttgttaacgttgtttggttttgttcgagcgttcggggtttcgggtttaggaggagtagttgttcgggttagttgcggttggttttaatgtgattatggtaattaagtttcgttttttttatcgagtttttaggttttcgtagagagggattgagtagtttggttgtggagaaagggaggggaggttgagaattgtgaaatagaattaaagggagattttagataaagaaattttagataaaaggagatgaagggaggtagaggaaatagaaagcggtattgggggtggtggtcgggagtttaggttttttagagggggagaatttaggagaggcggagaaagaggtagaagtaggggttgatttgtaggggagaagagagattagaattgattggtagaggttttttagagattttttttgggtttttgagaatttattttttttttttaggattttgtattttggagagaattagaattttagttttttagttggttgttttaaaaatattatatatggcgagagtttttttttaattatattaatggttataggaaatatttgaaaataaaaggtgtttttagtttttataaataattttaattttaaagtttaaattattattttttaaatattaatggtaatggtgttagttgcggtggtttatgtttataattttagtattttgggaggttaaggagggttgatcgtttgagtttagaagttcgagattagtttgggtaatatggtataattttatttttataaaaaatattaaaattagttggatgtggtgatgcgtattaggaggttgggtgggaggattatttgagttcgggaggttaaggttgtagtgtgttatgattgtattattgtattttagtttgggtaatagagtaagattttgtttaaaaaaaaaaaaaaaagggtattgttagataatgtttagataatttttggtttggaaattatgattttaaagttaaaggtgatgaattaggtttggagggattggaggagggaagaggagtaatgaggtcgttttttatagtatgtaagaggaagtagagtattaaatgggaggggagaaagtagggttttgcgtttgagagggagagttaaggtttcgatttaatatttggttttttttggttgagtttatattagtaagagggagataatggttattggtttagagtttgtttagaagataatgagatagtatttgtaaggtataggtttattgataaaagtaattatttaaattttattaaatatgatttttttttgtggattttttatgtgttatttgggatttttgagtgttattttttaagttattttataatagttgttattaagagtttgttttgagaggtcgaggtgggtggattatttgaggttaggagtttgagattagtttagttaatatggtgaaattttatttttattaaaaatagaaaaaaattagttgggtgtggtggtgcgcgtttgtaattttagttatttgggaggttgaagtaggagaattgtttgtatttgagaggtggaggttgtagtgagttaagattatattattgtattttagtttgggtgatagagggagattttgttttaaaaaataataataataaaataagagtttgtatagggtattaggtgtagtggtttatgtttattattttagtattttgggaggttcgagttaggtagattatttgaagttaggagttcgagattagttcgattaacgtggtgaaattttgtttttattaaaaatgtaaaaaaattagttaggtatggtggcggttatttgtaattttagttatttgggaggttgaggtaggagaatcgtttgaattcgagaggtggaggttgtagtgagttgagaatgcgttattgtattttagtttgggatataagagtgaaagttttttttaaaataaataaataaataaataaataaaaataaaagagtttgtatagggtagggttttgatagagagagttatgaaagatgtatttagtaatggaatttattttttattttttaggtttttataatttagagagtgttaggcgtatatatgtagttatagaagatagaatatcgtgttataggtagagttggaaagggttatgggaatttagggaaggaggaggttaggtttttttgagtgggataggagataagatttaggaagattttagggaggagttggagtttgaattgggttttaagttatgttaagatttgtagagatgaggtaaggttatttttggttagagaagcggaggagttaaggtagggaggcgtgaatatggttatgtttaaatgtagttttatttggaagaagggtttattttatgagtgaaattagaaaggtagatttggaatttattattgagtagtttggtttattttgaaggtgaggagaaagaattttggggttttgagttgggaaatgatatgtttagatttgtgtttttttaaaagtggtttttggtagtagtatgtgggatgtagagtttagagtaatggttgaggggagggaggagttaattttattttattttgtgtacgttttatggtgttttttttaagtttttagttaggatagtagtgtatattttaggtgttttattagtatttttaattattttgtgtttgtttttttagggttttttgatatgagtggggtagggtttttataaaaagaaaattttgtaattttagttatttagaagttgaggtaggaggatggtttgagttttagagttcgaggtaatagtaattatgattatattattatattttagtttgggtgacggagtaagattttatcgttaaaaaaagagtgagaaaaaagaaaattaggtttagaggggttgcgatttattttaaattgtaatagtaatttaattgttatttaatggtaagtggttgttttttatttagaattttttttggatttttttattttagttttttaaaatggaaagggggatgtagaatggttttttgggtttttagattggatcgattttggatcgatcgttaagtttggtgagttttgtttttgcggaagttcggttttgataaatttatcggagtattttttaggttttatggttcggatagtgaataggaaggttatttgggggcgtttgttgtataggtgattaattttaattattggaaaatggaaggaaagtgaaagcggttaggaaagagatttaggtttgggtagggaatggtaggaagtatcgtaaagtagtagatttaagagagaggttagaaaggttgattggaagtttagggtagttgcggggttatttagggtataatgatttaatttgtatatataggagatgttgttatttataggtagaatgttagaatttttatttttttttttttattgttttttgttaaaaagtttgtggaatttttagtagcgttttaggatttttgagttttgttgtgagttaggttttgtttttagcgttttttagagttattttatttggtttatatagtagttttgtgatgtggtattttgaaatatgtttatttagggtagaaattgagagttagaaaagttgttttttatttttattttttatatatatatagtaaatggtagatttggaatttagattttagttgtttgtttatttgttttatagagataagttttttgttatttaggttggagtgtaggggtataattataatttaatgtaattttttaagttatttttttattttagttttttaaatagttggggtttaggtattattatgttttgttattttttatttttatttttttgagatagagtttcgttttgttgtttaggttggagtgtaatggtacgttttcggtttattgtaatttttgtttttcgggtttaaacgatttttttgttttagttttgagagtagttgggattatacgtgttcgttattatatttagttaatttttgtatttttagtagagataggattttattatgttggttaggttgattttgaatttttgatttcgtgattcgttcgttttcgttttttaaagtgttgggattataggtatgagttattacgtttagttattttttgtttgtatgtagagattggtagagatagggttttattatgttacgtaggttagttttaaatttttggttttaagcgatttttttgttatagttttttagtgtaatgagattataggcgtgtgttataatgtttggtttaaatttgagtttttttgattatagagttaaagttaggttggaggattttagttattattttttttttaattttagaggtttataatatatttttattttttttttttagtttttgaatattttggaatattgttattaatttttttaattttttttattttttaagaatattggtggtttaaattatttttgtgtataaaaaatgtatagagatttaaaaatggtaaatgtttattttaaggttattttggaagttagggttagtgttaggatagtgtttttaaattgaggtttttggatttttgaggatttgtgaatatttgtgaaaattattaagttttatgtttaattttttttagtagtatttgaaaagtgttataagtatgttttgggttatttgtaattgattttggttttgtttgtgagtatttgtatttgtatttatttatttatagttttaattgttttggtcgtatttgtattaagtgaaggttaggagataagttttaataaagattttttagtaatttgaatagatatgagaaggggaagaattgagttatcgttaggtatatagtggaatattgtgttaagtgcggaagaatttttattaggtagtatatggtttgttgttagtagtaattttattttagaaaaatattatttattatattaatgttaaatttgtttttatatttttgtttgtatttatggttattttgttttggttttataattgtttaattattgaagtataaggaatttatagttagttgtgtttttatatatttaaattataaaaataatttaagtttatgaaaattgttttttttttaaaaaggtttatttatatattatttaagtttttgtttttatagtaggtataaattaaatttgggttattaagagtttttaaggaaaatttgtaatgatggagtttttgttaaaggttaaaaattttttcgatttttaagatttagtgtaagtgaagtagttagttgtttggggtaaatattcggggtttgttattttatgttaggaaaatgtaggatacggatatacgcgaggagtcgcgaggagtttaagagggaaggtttaataggtaaaagaaagagaaaggaaaatagttttttttttagtgagagaggggattttcgagagaaaaggggtagttggaggtagatgagtcgaatttatagtttagtttgaggaggcggcgtttgatttatttaggatttatagattggtttgattaggtgtttgtttatatagttgggaaggttggtcgttttattttaagtttattatgtaaatgaattttttcggagggtgttattttgtcggttttttattgtatttgtggttgatagagaagggatgatggggtcgttattttgaatacgattggtataattgtcgttatttatgtttgtagttcgattttataggttgttttttgttagaaggaaaaatgatttgggtttgttttttattaaaagagaaattttattaagaatttcggtaattttattgtttatttaagtaatttttttttaatttttgtgttataaggaagttagaatttggggtttttgggttattaagagaggaagatgtgaaggattgatttataaagtgaagaagttagagggtagttatttggggaaaattttaaggatagtttataggatagaattaagaattggttaggtgaggttaggcgttttggtttatatttgtaattttagtattttgggagggcgaggtgggcggattacggggttaggagatcgagattattttggttaatacggtgaaatttcgtttttattaaaaatataaaaaaacgagtcgggcgtggtggcgggtttttgtagttttagttatttaggaggttaaagcggtaggatggcgtgaatcggggaggcggagtttgtagtgagttaagatcgtattattgtattttagtttgggcgatagagtaagattttattttaaaaaaaaaaaaaaaggttaggtgaggtggcgtacggttgtaattttgttataggaaaggggttttaatttagattttaagagagggttgttggatttcgtataagaaagaattttgggtgagtttttagtgtaaagtaaaagtaagtttattaagaaagtaaaggattataagaacggttgttttatagagtagttttgagggcggttggttgttcgtttttgtggttattttttgatgatatgttaaataagggttggattatttatgttttttttttttattttttattttatttatttatttatttttgagatggagttttatttttgttgtttaggttggagtgtagtggtgagattttagtttattgttatttttattttttaggtttaagtgatttttttgttttagttttttgagtagttggaattataggcgtgtattattaggtttggttaatttttgtattttttttagtagagataaggttttattatgttggttaggttggtttcgaatttttggttttaagtgatttgtttatttcggttttttaaagtgttgggattatagacgtgagttagggtatttagtttttttttttagattatatagggtaatttgttgatattgttatggtatttgtaaattgttatggcgttggtgggagtgtagtagtgaggatgattagaggttatttttatcgttattttggttttggtgggttttggttggtttttttattgaaaattgttttattagtaatgtttttatgatttatattttgtgttggtttgttgttttattttgtgatttagaatattttaattatgtgggaatgtagtttagtaggttttagttttattttatttagtttttatttaagatgggattgttgtggtttatacgtttttgataattttagtattttgggaggttaaggtaggtaaattatttgaggttaggagtttgagaatagtttgagtaatatggtgaagtttcgtttttgtaaaaaaatacgaaaattagttaggtgtagtggtgtatatttgtgatcgtagttatttaggtatttgaggtgagaggattatttgagtttgagagatggaggttgtagtgagttatattattgtattttaggttggattatagagtgagattgtgttttaaaaatgagtaaataaatatagaaataaataaataagaaaaggaaaggtaagtagttaaatgtttattaataggtatgaatagttataaaaattattgttttattttaggtttttttaaaagtatattttgggataagtatttggatataagtagtttatttaggaggggtattgagtgaagggttgggaagagtgagatagggaagggagaagagttaataaagcgtgtgttaatgagtagattatttattgttgggagaagtggaatttaaaattgttgggattgtaagtgtttaatgggttttttttgtttgttgtttagatagagttaatttataaaggtaggggaattgtagtagagaaagagttttttatatgtagagttggcgaaggagaagattggagttttattatgtttaaattagttttttagaaaaaattttgagattagagttttttaaggatagtttgggggaagaaggggagtagttaggtaatgggtgtttgttgttgattggttgtaattataggggtgtgggaaatggtttttatatatgttgagttatttttgggtggggttataggagtagttggaggatttagttggagttataagtcgttagatatagaaaaaaatttgaaaagatattttaaaagtttagatatttatttatattaacggtgaaaagtatattttatagtgttagtggaggtaatatggggttttggattttttttttatttttagtggtagtgaggtgttttttttattttttttgagtagaggaagttaagaggaaagttggaatttgtattattatttagtggtgataaagtttttgtttttttattttatttttaggttattagtggtaattatatggttagtggtatttttttcgtttttagttagaatgatattagtagaggtttagagagtagtttaaaaatttatttgtatttagtaggattgaggttttttatttttattaatggaagttaagtgaggaatttaagtttttattttttatttagtaggaattagataatattttttaatatatatatatatatatatatatatatatatatatttttttgttagtgtggtattaaggaggtttgataaaatagaagatttaaataggatttagaggttgggtgtaatggtttatatttgtagttttaatattttaggaggttaagttgggtggattatttgggtttaagagtttgagaatagtttggacgatatggtaaaattttgtttttataaaaaatataaaaattaattaggtgtggtggtatatgtttgtagttttagttatttggggggttgaggcggaaggattatttgagttaggaggtagagattttagtgagttaagattgtattattatatttttttagattgggtgatagagtgatattttgttttaaaataaattaataaataggatttagagttttataatataatatttaaatgtttaggatgtaattgaaaattatttgttatattaagaattaggaaaattttaattagaataagaaaagataatagatgttaatattacgataatatagatgttgtaattatttgataaggaagtagtcgttataaaaaatgttttaataagttattgtaaatatgattgaaataaataaaaaagggagaagttttagaaaagaaatagaagatataaagaagaattaaatggaaattttagaattgaaaaatgttataataaaaatttaaaatttattaaatgggtataatagtagaatggagaggatagagaaaagatttagtaaatttgaagatagaataatagaatttatttaatttgaataatagggagaaaatagataggaaaaaaatgaacgtaattttagattataatgaatataattatgtgattgtaataaaagatttagtatttatgttattggggttttagaaggaaaggagaaataggatggagttgaaaaagaattgaaaggaataatggttaaaaatttttttaaatttagggggaaaaaatataatagatttaagatgttaagtaaattttaaatagaataaatttaaagaaatttatgtagaggtatattataattaaatttttggaaattaaaaaattttgaaattaattagaaatgatatagtatttgtagaggaaaaataatttaaatgatagaagattgttttttagaaattatgaaaattaaaaggaaatgatattttttttaagtgttaaaggaaaataattgttagtttagtattttgtagttattaaaaatattttttatgaatgaaggggaaattaagatatttttaggagaaggaaaatgaaaagaatttgttattagtagatttattttaaaagaatggttaaaagaaatttttttttttttttttttttgtttttttttttttttttttttttttttttttttttttttttgtatgtgtgtgtgtgtgtgtatgtgtgcgtgtagaagtaggattttattatgttgtttaggttatttttaaatttttggttttaggtgatttttttgttttagttttttaaagtgttgggattgtaggtgtaagttattatatttagtttaaaaggaatttttgagataaataggagaggataaagaagaaattttggagtattaggaagaaagaaagaataatagaaaatgtaaaaatatgggaagattattttattttattttttggtattaggtttggttatgtgattttttgtggttaattaaatgtgagtagaagtaatatatattatttttaggaaatagttttaaaggttagtgtgtggttttttatgattttttttttttttatgatatttgttattgttttagttttgttatttgggttttggtgtgagatgatatggatagggttatagttaatttgtaatgaatatatatagtatgagtaaaaataaattttggatgttgtaaatattttaagatttttggttaggtatggtggttgaagtttgtaattttagtattttggaagtttgaggtaggtagattatttgaggttaggggtttaagattagtttggttaatatagtgaaaatttatttttattaaaaatataaaaattagttgggggtggtggtaggtgtttgtgattttagttatttaggaggttgaggtaggagagttgtttgaatttaggaggtagaagttgtagtgagttaagattatgttattgtattttagtttgagagatagagtgagattttgttttaaaaaaaaaagtaaagatttttttaattatggtaaaatttgattttttttttttttttttttgtgatagagtttcgttttgttgttaggttggagtgtagtggtatgatttcggtttattgtaattttcgttttttaggtttaagtaatttttttgttttagtttgttaagtagttgagattataggtacgtgttattatatttagttaattttttgtatttttagtagagatagggttttatcgtgttagttaggatggtttcgattttttgatttcgtgatttgtttgttttagttttttaaagcgttgtgattataggcgtgagttattacgtttggttgattttttttgattgatatataattatagtgatatatttgtatagtttttttgtgttgttaaaattttatattatttattttgatttttataaaattttatgaagtatgaagataaattatagagggagttagtttttagtattttaatgtaggtttttttttatttttttttagtgtcggttggtttgagaaataaagagaaatagtataaagagagaaattttataattgggtttttagcggtgagattatatattggtaggatcgtgatgataatttcgagttgtaaaattagtaggtttttattagggattttaaaaggggaggggtgtacgaatagggagtaagttataaggattatatgtttcgaagggtaataaagattataaagcgaaggtaaaattagaattattgatgagggtttatgtttcgttgtgtacgtattgttttgataaatattttaataggaaatagggttcgagattaaagaatcggtttgattagaatttattaggttggaattttttaattttagtaagtttgagggtattgtaggagattagggtatattttagtttttattttaattatataagatagatatttttagagtagttatttatagatttttttcgaggaatgtattttttttttagggttatttttttttgggaaaagaatttagcgatattttttttcgtatatttgtttataggttttttgtaagaagaaaaatatggttttattttgtttaattttgtaagtagttagattttatggttatttttttttgttattttaaaattgttgttattttgtttttttttagagtgtattgattttatattgtttaaatttatatgttttataattagattttatattgtttaaatatatatgttttataattaatttgtataatagtggttttgaggtgacgtatatttttagtttatgaagataataggattaagagattaaagataggtataagaaattataagagtattagggaagtgataaatatttatgaaatttttataatttatgtttagagattgtagtaaagataggtgtaagaaattataaaagtattaatttggggaattgttaaatgtttatgaaatttttataatttatgtttttttgttttggttttagttggtttttttatttagggtttttgattttttataataaattaatgatatttttgtgttaaagattagttgaattttatgttgttttcggttattaattgatataaataagtatgtttgtaatgagttttaaaatggttttatggagttgtttatgtaagaagtagtcggatggtaaattagttattgtaatttgaagtgtttatagttataattttttatataaggtttttatttgtaatttttgtttgttttttatatttataatattttaaaaggtatagattatttttttaagttttatattatatattattttaatttgttttggtgtaaaattgttaatttttttgaggtgatattatagaattattaaattagatacgttgtatgttatatagtatatattttaagttattttttaattaaaaaaaataaattttaaaatttggtgaaaatttattgtgtttgttatttattgttgtataataaattgttttaaaagtaagtggttttaaataataagaaatatttattttttattttttttaaatatatatatatatatatatatatatatataaatatagtattaatttgttattgttgaagttttaaaaagtgatttgtatgttaaaaataaattttaattttttttttttgttatttaaattaaagaaggttagttttataatataaaagtgcgaggtgaagtagtaagtgatgatgaagaagttgtattaagttatttagaagatttagttaagataattggtgaaggtgattatattaaataatagattttttatgtagataaaatagttttatattggaagaagaggttatttaggatatttatagttatagaggaaaagttaatgtttgtttggttttaaagttttaaaggatagtttgatttttttgttagaggttaatatagttgatggttttaagttgaagttaatttttatttattattttgaaaattttttggtttttaagaattatgttaaatttattttgtttgtgttttataaatggaataataaagtttggatgatagtatatttgtttatagtatggtttgttgaatattttaagtttattgttgagagatttattgtttaggaaaaaaaagattttttttaaaatattattgtttattgataatgtagttggttatttaagagttttgatgtagagatataaggagataaatgttgtttttatgtttggtaatatagtgtttattttgtagtttatggattaaggagtgattttaatttttaagttttattatttaagaataaattttgtaaggttatagttgtaatggatagtgatttttttgatatatttgggtaaaatatattgaaaattttttggaaagtatttattattttagatgttattaagaatatttgtgagttgagtacggtagtttatatttgtaattttagtattttgggaggtcgatgtgggtggattatttgaggttaggagttttagattagtttggttaatatggtgaaattttatttttattaaaaatataaaattagttaggtatggtgatatatttttataattttagtattttgggaggtcgaggtaggtggattatttgaggttaggagtttgaaattagtttggttaatatggtgaaattttatttttattaaaaatataaaaattagttaggtttggtggtagaggtttgtaattttagttatttgggaggttgaggtaggagaattgtttgaatttgggaggtagaggttgtagtgagttgagatcgtattattgtattttagtttgggtaataagagtaagattttgttttaaaaaaaaaaaaaaaaagagagagaaagaaaaaaaaagaatatttttgatttacgggaggaggttaaaatattaatatttataaaagtttggaagaagtttggtgtaaatttttatgaatgatttttgaggggtttttgatttcggtaattgtagatgtggtagaaaaagttagagaattagaagtggagtttgaagatgtgattgaattgttgtaattttatgataaaatttgaatagatgaggaagtgttttttgtggatgagtaaagaaagtggttttttgagacggaatttatttttgttgaagatgttatgaatattgttgaaatgataataaaggatttagaatattatataaatttagttaataaagaagtagtagggtttgagagaattgattttaattttaaaagaagttttattgtgggtaatatgtattaaatagtattatatgttatagagaaattttttataaaaggaagagtgaatcgatgtggtaaatttcgttgttgttttaatttaagaaattgttatagttatttaagttttagtagtttttattttgattagatagtaatatattttttatttataaaaggattataatttttcgaaggtttagataattattattattttttagtaataaagtattttaaaattaaggtatgtatttttttaagatataatgttattgtatacgtaatagattataatatagtgtaagtataatttttatgtgtattaggaaaataaaaatttagtgatttattttatcgagatattttttttattgtgatgaattggaattgggttcgtaattcgtaatatttttaaggtatgtttatatttgagaaagtagtattgaaatggtaaataaataatatttatgaaagttttgttagtaaggaagtagagggtggttgttttgtggaaattaaaagcgtgttttgtaaaaatttttcgtgaaattagataggtttttttttttttttatttttttttttaagatagggtattattttgatattaaggttggagtatagtgatgtgattttagtttattgtagttttaattttttgggtttaagtgatttttttattttagtttttttagtagttgggattataggtatgtattttaatgtttggttaatttttttttttttttaaatagtggtttttttttgttgttttggttggttttgaatttttaggcgtaaattgaataggttttttaaagtgttgtgattataggtgtgagttattgaatttagttagataggttttttttagtaagttgtttgttatgtaaagagatttgggttataagatttagtagtttttgggaagtttttaaaaaagaagttgaatttggttatgattagattggtatagtattataaaggatgatatgaagggtgatatagtttgaattcgtgtttttgtttaaattttatattgaaatgtaatttttaatgttggaggtgggtttttgtgggaggtgattggatcgtgggggtagattttttataaatggtttagtattattttttttagtattgtatttattatagtgagtgagtttttgtgatatatggttatttaaaaaggtgtagtatttttattattatttttttttatttttgttttcgttatgtgagatttttgttttttttttattttttattatgattgaaagttttttggggtttttttagaaagagatgttgttatgttttttgtatagtttatagaatcgtgagttaattaaatttttttttttataaattatttagttttaagtatttttttatagtagtgtaagaatggtttaatataaagggaaagtaagattaggggaaggggtgttagtaataaggttatgtattatgtgtttttaattttaaattatatacgtattgggaaattagaatttgtaggtggatggattattattatgtttattttattttaggagtagtaaaattgttttttttagagattttttatcgtgaattttagagttatttagttatgggtaaagttaatttaagtataaatagtagatttttagcgtttgattgggatttagagttatttggttagcggggagggtaagggatggatattgtgaaggtttagaggttagggtgggagggggttggtaatgggttaattaaaggggtttttatataaatattttatttaagatattaaaagtgataatttgagatttttattagtttgattttgttgatgaaatatttattttgaggggaggagggaggtatttaagggatattttatgtattttttatttagattttagggaaattagaggtaaggattttataatgatttgttttatttgaggatgatggtgatatgttgatattattttttgtattgttcgaattttgttgtatattaaaaatataatttgtattattatataattacgtgattattaattgagatatgaagtttatattttgtttttggattttgagagtttgtttggagattttagtaggggagcgtagttattcgtatatttttagtcgaagattggtttttttttattggggatggtttttttttttaattgagtatatagttttaggagggatgtatatggagtggtgagggaggaaggggatattatttagttagttagattagtagaattaatagtggtaattattgaggtgatagatgttatagttagattatttttatatttaatgtttttggaaaatagcgtttaattttttttatttgagaaggtatttgattatttgtttgttgtttatattaggggttagatatggtatattagttatttttttagaggtattttttaggtttagtaggaagtttttttttgattggggagttgggaaagggtagggatgtatttttttgcggagatttattttttttataatgggatttaaattattaaattgattttataatattagttttagagtattttatttgtaaacggagtgaaattatttaaattataaaggaattttttatttgataaaagaaatatatggttttaggtagcgttttaatgttttatagtatgtgtttttagattaatagatatttagtagagggaaggtgtattagttttgtaatagggtgtattagtattgttataaagaattatttgagattgggtaatttatgaagaaaggaagtttaattggtttatagttttataggttgtataagaattatgtttggggaggttttaggaaatttataatttgggtagaagggtaaggggaagtaaatattttttttatacggtggagtgggagagagggaaagtgaagggggaggtattatatattttgtttttttgttttgttttgtttgtttgtttgttttttgagttagagttttgtttttgttgtttaggttggagtgtaatggcgtgatttcggtttatagtaatttttattttttaggtttaagtgatttttttgttttagttttttaagtagttgggattataggtatgtgttattatgtcggttaaatttgtatttagtagagacggggtttttttatattggttaggttggtttcgaattttcgattttaggtgattcgtttattttagttttttaatatgttgggattataggcgtgagttattacgttcggttttattatatatttttaaataattagatttcgtgggaatttatttattattacgagaatagtaagggggaaatttgttttaatgatttaattattttttattaggttttttttttaatattttaatattgggaattatagtttaatttgagatttggatggagtttatattggagggattgaaagtttttatgttttaagatatagattaataagaaagtaagtaaattaaaaaggaagtttgaaattttagtagtaagatgaattattaggtcgggcgtggtggtttatatttgtaattttagtattttgggaggttaaggtaggtggattacgaggttagtagttttagattagtttgattaacgtggtgaaattttgtttttattaaaaatgtaaaaattagttaggtatggtggtgcgcgtttgtaattttagttatttaggaagttgaggtaggagaatcgtttgaatttgggaggtagaggttgtagtaagttgagtttatattattgtattttagtttgggtgatagagtaagattttattaaaaaaaagagagagagagagaagtgatttatgtatttggttttttttggataggaagttaaaattttaggttggtgtttaatttcggatgattgttaggcgtagttgaagattttgttgggtttttttgggtaattggttttttatattggtttgcgggtttgtttgtaattttaggcgatagagttgggagtgtgttgggggaggattaagattaggatgagacgtaggtgagggtttagtcgtattgtttgtttatgggatgttttttatgagattttgtagttttatatcggtaagaaaagaatatattttttttatgtgttagttgggagttgaggagattggttatatttatagaaaatttaaggaacgttagtagttatggtttttaaggttaaaatttaaatagtgtttggggaggagttggttttttttattatgtatagaggtgtttatgtggtgtttttaggttaacgaagaatgtttttttaagattttagttttttattatatttttttaatttttaattttttttttttttttttatgaatttattttttttttatttttttttaaagttttttgtttttttaagtttttgtattgagttgcgtcgatttttcggtaagattagtaagtttttggtttttttttatatttttgtgtttgtagtttgttaatttttaggtaaatagattttgatagattgttttattaggtagagtgttatattttttggtttttttgttattagttgttaggatttagtgtacgaggttattattattttggttagtttttttattattttatttttttttttttttttttttttgtttaaaaaaagagagagagagaaagagggtttcgttttgttgtttaggttggagtatagtggtataattacggtttattgtagttttgaatttttgggtttaagtgatttttttaatttagtttttggaatagttaggattataggaatatgttattatgtttggataatttggttttttgtttgtttttagagaggaagtttttttatgttgtttaagtaagtttttaatttttggttttaagtgataattttgttttggttttttaaagtgttgggattataaattgatatggtttggttgtgtttttagttaaattttattttgaattgtagtttttataatttttatgtgttgtaggagggatttggtgggagataattgaattataggggtggttttttttatattgtttttatggtagtgaataagttttatgagatttgatggttttataaggggaaattttttttatttagttttttattttgtttttgtttgttattatgtaagatatggtttttgtttttaattgtgattgtgaggtttttttagttatgtggaattgtgagtttattaaattttttttttttttttataaattatttagttttgggtatgtttttattagtagtatgaaaagggattaatatagtatattggtaatgggagtgagatgttgttgtaaagtaatttaaaaatgtggaagtaattttggaattgggtaataggtagtaattggaatagtttggagggtttagaagataggaaagtgtgggaaagtatggaattttttagagatttgttgaatggttttgattaaaattttgataatgatatggataatgaaatataggttgaggtggttttaaatggagatgaggaatttgttgggaattggagtaaaggtgatttttgttatgttttattataaagattggtggtattttgtttttgatttagagatttgtggaatattgaatttgagggagatgatttagggtatttggtagaagaaatttttaagtagtaaagtatttaagaggtgatgtaggtgttgttaaaagtatttagttttaaaattgaaataaagtataaaagtttagaaaatttgtagtttgacgatgtgatagaaaataaaaatttattttttttttgtttgtttgtttttgagatggagtttagttttgttatttaggttgtagtgtagtggtatgattttggtttattgtaatttttgttttttaggtttaagtaatttttttgttttagttttttaagtaattggaattataggtatatgttattacgtttagttaattttgtatttttagtagagatagggttttattatgttggttgattaggttggttttgaattattgattttaagtgatttgtttgtcgtggttttttaaagtgttgggattataggcgtgagttatcgtgtttagttaatttttgtattttttgtagagatggggttttgtttaggttcgtttcgaatttttgaatttaagtgatttatttgttttagttttttaaagtgttgggattataggtatgagtcgttacgtttagttaaaaaaattattttttgaggagaaattcgagttagttgaagaagtttgtataagtaatgaagagttaaatgttaattattaagataatggggtaaatgtttttagggcgtgttagagatttttgtagtagttttttttattatagatttggagattagggagaaaaaatggttttgtgggttaggtttagggtttttttgttgtgtgtagtttggagatttggtgtttgtattttagttatggttaaaaggggttaaggtatagtttgggttatggttttagagggtgtaagttttaagttttggtagtttttatatggtgttgagtttgtgggtgtattgaagttaagaattgaggtttgggaatttttaattagattttatttggatgtttaggtagaagtttgttgtagcggtggagtttttacggaggatttttgttagggtattgcgggaggaaaatgggaggttgaagtttttatgtagggtttttattggggtattgtttagtggagttgtgagaagagggttattattttttagattttagaatggtagattcgtttatagtttgtattgtgtgtttggaaaaataatagatatttaatattagtttatgaaagtagttagaagaggggttgtattatgtaaagttataggggtagagttgtttaaggttatgggaatttattttttgtattagtgttatttggatgtgagatatggagttaatggagataattttggagttttaagatttgattgttttattggattttggatttgtatggggattgtagtttttttgttttggttaattttttttatttggaatagttgtatttatttaatgtttatatttttattatatttaggaagtaattaatttgtttttgattttgtagttttatagttggaagggatttgttttgttttagatgagattttggattgtggatttttaagtttatgttgaaatgagttaagattgttgggaaggtatgattggttttgaaatgtgaggatatgagatttgggaggggttggggtagaatgatatggttgggttgtgtttttatttaaattttattttgagttgtagtttttataatttttatgtgttgtgggagggatttgatgggagataattgaattatagggagtggttttttttatattgtttttgtggtagtaagttttataagatcgggtagttttataaggggaaattttttttatttggttttttattttttttttgtttgttattatgtaagatgtgttttttgttttttgttatgtttgtgaggttttttttgttatatggaattgtgagtttattaaatttttttttttttataaatgatttagttttaggtatgtttttattagtagtatgaaaatagattaatatataggtttttattattttttttttttttttttttttcgagatagagtttcgttttgttgtttaggttagagtgtagtggtataatttttttttattgttattttcgttttttgagtttaagtgatttttttgttttagttttttgagtagttggtattataggtgggtgttattatatttggtttatttttgtatttttagtagatatggggttttattatgttggttagggtggttttaaatttttgattttagatgatttatttattttagttttttaaagtgttgggattataggtgtgagttagtatgtttggttatattatttatttttgttgttagaatttttgttattatttttgttatttgagggtagaataaaaggttgtttatattatttgatttagattatgttggttaaaagttagttttatagtatgtgatattgggaaatgtagttttgatttaggatggttataagtttagtaaaaatttgggagttttattagtaaggaagaagaggagaatggatatttggggataatagtagtttttgttataaagtatatagtgggaagtgagagattattatatatttttatttttattaggagtagttggtttgtaaatggtataaagtaagtgaagaagttttaaatgttatttattttatttttattttatttttttgagatagggttttgttgcgtttttaaggttggagtgtagtggtatgattatggtttattgtagttttgattttttgggttttagtgattttttttttttagttttttagtagttacgattataggcgtgtgttattatgtttggttaatttttgtatttttggtagagacggggttttattatattgtttaagttggttttgaatttttgagtttaagtaattattcgttttggttttttatagtgttaggattataggtatgagttattacgtttggttagaagttttaaatttatataaagtgtgaagtttggaatttataaatttatagtgtggaatggggaaggaagaaaagttttttaagagatataattagtgttttttttggttgttagagtgttgaaataaattagatattttagtatagtaagagttaattttttttattgggttttagtaggtagttcgggagtagtgaggtcgtagtgggttgatagggtttgtttgtttgtttgagagttgataagttgtacgtataaaatttatttaagtagaagaagtatttatgtatgataaatttgaattaataataaagttttggatattaaattataattgtttttttgttcgtgtttgtgtatgtgtatatcgttttttgattttgtattaaattataaattttatgggtatagagattacgtttattttgtttattatgtttattatgtggttagtatggataaggaatttaggaaatatgtgttgaataaaagagtaaatgaatgttgtttgttattatatttagtttagttttgtttttattcgaagtaaaaagaaagttgaaggttaatatagaagttgtggttttataagttttgtataatgttggagtttattagtattgtttgggtggttttttcgtgaataggaatataaaagaggggaaaggtatttttttattggatatagatattgttttgtttaatgtagaattgatgtttgaagggtttcggttttttgggggaatgtttagtaggcgatggagagttgttgttggtttgggtgtttggatttaggagtacgagtgagattttttttagatttttagaaatatttgggtagagaaggagatattgaaatgttgttattattttaaggtggttttatttgtatatttttataggttagtaagatttagggatgtttaggttatttatttggaatttaatgttgaaatattatgaattgtgtatgatagattaattattattattgggatgagagtttttggttttttgggatggtggtagtggtattggtggagtttagttgtttgtggttttaggttgaggtgggttgaaaaagaaatatgaaggtagaaagagaaagtgaaggtagttttattagatttttcgaggatgttaatttttttgtagttatagaagagatgaggtagatggtagaggtagagggggttgggatttggtaaatagtggtttttatttaaaatagtgagtttttaaaaaggttgaatttttttttaaatggaagagagggggggaaaaaatgagatggattagagtttaaaagtagtagagtaattttgtagttttcggtttgggagtgtttttataaagtgggggttatcgagtggaataggaaaggggaaaggggaagatttttaattatttgaggaaattgaatttagtgagggtattttttcgagttttaggaaagggtttttggtggtattcgttagggagttgaatatatgtttttgtaatttggaggatagggtgagtagttagttggtttatttttggaaatggaaaaatatatatatatataaagatatatatataataaaaaagaatattaggagtttggttatttgttttgatggtggaataagggaggtagttgggttttagggttgttagtttttcgtaattgtcgggggtattggatttatgttttttgtggattataggtggggttattataagagagagatggtaggggatggtattagattttgtttaaaagggttatttgaaggggtttggtgattttaatagagggatgaatcgttagatttttagaagttgtagaaagaaatatagttgattagtttaaggaagggtatttgtttattttagggaattaggtgatgagaaatcgtagtaaagggaaggtgttagtttagaaaaattaacggaagtgtttgatgaaaggaagaattagttatgtttgatgatttaggtagtgtttttgttattttatagtaattttagtgtaatgatattttttggttttttttttttattattggaattttggagaggtttagggtttaagttagtaagatgagggaggagggatagaagtatgtatatataatgaatttgtgtaggtagaatttaggtttagtagttgagagaaaaattgtatgttaaaagataaagtgtgttttttattaatagttttaatattaggagttttaggttggatagagtgatttcgcggtgttggagattttagttttttttgttttgttgttttgttattgtatcgagggttgtttttttttgaaaggttgaaatggttttttatatttgttgggttagtattttagttagggaaagaaggaaaggggaaattaatgttatttatgttgtttgagggtagaataaaaggttgtttatgttgttttgatttagattcgttggttaaaagttagttttatagttatatttggttgtaagggatattggaaaatgtagttttgttttaggttggttataagtttagtaaaaatttgggagttttattaattaggaagaagaggagaatgaatatttggtgataattgtaatttttgttataaagcgtaaagtgggaaattagaggttattatatattttaatttttattgagggtggttggtttgtaaatagtataaagtacgggaagaaattttaaatttaaataaagtttaaagtttttattattatatgagattggattatttaattatttattaaattttttggggaattggagtaatttaatgattttagattatttataaatgattagaaagtttatggggtttgttttaaattttattttggggtaaaaggagaagaaattttataaaatggatgtaaagggatacggtgaagtgaaaataaagttgttttttgatttttttttttttagttagattaggttaggttgttataataaaaaaataaaattttaataattggttggttgggattttatatttaattagtggttttgtcggagatgtttgaattagagtaattttattttaaataggggttgggtaaaatgaggttgagatttgttgggttgtatttttaggaggttgggaatttttagttataggatgatataggaggttagtataagatataggttataaagatttcgttgataaaataggatgtagtaaagaagtcggtttaaattaagatggtgataaaagtgatttttggttatttttattgtttattatatgttaattataatgtattagtatgttaaaagttattttttattagtattaagatagtttataaatgttatggtaatgttttagagttattttatatgatttaaaaggaagaagaatttatagttttaggaaatttttattttttttttagaaaatttatggatattttattttttgtttagtatatgattaagaaataattggttaggcgttgtggtttatgtttgtagttttagtattttgggaggttaaggtaggtagattattttaggttaggagttggagattagtttgattaatatggtgaagttttatttttattaaaaatataaaattagttgggagtggtgtatgtttgtaaatttagttatttaggaggttgaggtaggagaatcgtttaaatttaggaggtagaggttgtaataagttgagatcgcgttattgtattttaagagtaaaattgtgttttaaaaaaaaaaaaaaaggaaaagaaagaaagaattataaaaatagttaattagtagtttttagagttattttatttatgaggtaattatttttttatttttttattttttaataaatttgtttttattttattttgtggattcgttttaaatttttttttgtataatgtttaagaatttttttttgagaagtgattggattaggatttttttttagtaatgatttgtgtatttaaattttggtttttttaatttgtgggtttatagatggttagtttttagatttttgtttttttttattgtaggttatatttgtgatttgggtttagagttgtgggtatagttttggaatagtatttgtaggttttttattatttggttattttttatttttttatttttattttttttgagagggagttttgttttgttatttaggttggagtgtagtggcgtaattttagtttattgtaggtttcgttttttggggtttacgttatttttttgttttagtttttcgagtagttgggattataggcgtttgttattttgtttagttaattttttgtatttttagtagagacggggttttattatgttagttaggatggtttcgattttttgatttcgtgattcgttcgtttcggttttttaaagtgttgggattataggtatgagttatcgtattcggttttggttattttttaaaaaaaaaaattattgagatataattgtatagatttaaagtgtgtattttgattagttttgtcgtatttgtatattatgaaattgttattataattaagatagtgaatatatttatattttttaaaagtttttttatgttcgttatattttttttttttttgttatgtttatttttaaatatttattgatttgttttttgttattgtagattatttgttttttttagagttttatataaatgaaattatatagtatgtattttttttttttttttttttttttggttttttttattttggttatttatttttaagagataatgtattagtttatttttatattgttatgaagaaatatttaagattgggtaatttataattttgagttgggcgcgtggtttatgtttgtaattttagtattttgggaggttgaggtaggcggattatttgaggttagaattttaagattagtttggttaatatggtgaaatttcgtttttattaaaaatataaaaattagttagttgtgatgatatatatttgtaattttagttatttaggaggttaaggtaggagaattatttgaatttaggagatggaggttgtagtgagtcgagattatgttattgtattttagtttgggtgatagagtgagattcgaaagaaaagaaaagaaaagaaaagaaaagaagagaagagaagagaagagaagagaagagaagagaagagaagagaagagaaaagaaaagaaaagaaaagaaaagaaagaaagaaagaaggaaaggaaggaaggaagggaaggaaggaagagagatttaatggatttatagttttatatggttgtggaggttttataattatggtggaaagtgaaggaggagtaaaagtatgttgtatatggtagtaggtaagagtatgtttaggggaatagttttttataaaattattagattttataagatttatttattattatgataatagtatgggaaaaattcgttatttatgatttagttatttgttattaagttttttttatgatatatggggattatgggaattataatttaagatgatatttgggtggagatatagttaaattatattattttttttttggttttttttaaattttatgtttttataatttaatatataattatgttttttaatagtttattaaagttttaatttattttagtattaatttaaaagtttaattttaaagtattatttgagataaggtaagtttttttttttatgagtttgtaaattaaaagtaagttagttattttttagatataatgggggtataggtattgggtaaatatatttattttaatgggatatattggttaaaataaaggtgttataagttttatataagtttgaaatatagtagggtagttattaaattttaacgttttaaaatgttttttttttgattttatgttttatatttaggttatgttgatgcgagagatgggtttttatagtattgggtagttttgtttttgtggttttgtagggtatagttttttttttagttgtttttatgggttagtgttgagtgtttttagtttttttaggtgtatggtgtaagttgttggtggatttattattttggggtttggaggatggtggttttttttttatagttttattaggtaatgtttcggtggggaattttgtgtaggggttttgattttatattttttttttgtattgttttagtagaggttttttataagggttttatttttgtagtaaatttttgtttagatatttaggtatttatatatatgttttgaaatttaggtagaggtttttaaattttaatttttgatttttgtgtatttataggtttagtatatttgtaagttattaaggtttggggtttggaatttttgaagtaatggtttgagttgtaggttggttttttttagttatagttggagttaaagtagttgggatgtagggtattatgtttttaggttgtatagagtaggggttttttagtttagtttataaatttttttttttttttaggtttttaggtttgtgatgggaggggttgttatgaagttttttaatattttttggagatattttttttattgttttagtgattaatattttatttttttttatttatgtaaatttttgtagtaaatttgaatttttttttagaaaatgggttttttttttttatcgtatcgttagattgtaaattttttaaatttttatgttttatttttatttgaatagttttattatttagaaattttttttgttagatattttaagttattttttttagtttaaagttttatagatttttagggtaggggtaaaatatcgttagtttttttgtataggaagagtgatttttattttaggttttaataagttttttatttttatttgagattattttagtttggataaatattgtttatattattgttagtattttggttaaagttatttaataagtttttaggaagttttaaagttttttatatttttttgttttttgagttttttaagttttgaggaagttttaaatttttttatatttttgtgtttttttttgagttttttaaatttttaatttttgtttgttatttatttttatatttttaggtatttttatagtagtattttattttattggtattaatttagtgtattaatttattttttttttttatttttatttttgagatagttttgttttgttatttaggttggagtacggtggtataatttcggtttattgtattttttattttttaggtttaagtaattttttttttttagttttttaagtagttgggattataggcgttaatcgttatgtatggttaattttttttgtttgtttgtttagtagagatggggttttattatattgattattaggttgattttgaatttttggttttaaatgatttatttgtttcggttttttaaagtgttaggattataggtatgagttattgtatttagtcgtattagttcgtttttatattgttatgaataaatatttgatattgggtaatttataaagaaaaagaggtttaatgtatttatagttttatatggttgaggaggtttttaaaattatggtggaagatgaaggaggagtaaaggtatgttttatatggtagtaggtaagagcgtgtgtagaattatttttataaaattatgagattttatgagatttatttattattataagaagaatagtatgggaaaaatttgttttttatgatttagttattttttattaggttttttttatgatacgtggggattaagggaattataatttaagatgagatttgggtggagatttagttaaattatattagatattattttaatggaaaatagtttagttgaaagaattttgttaagaatttatgttatttgtttgtgtagtaatttagagttatgaatttttgttaagttatgtgatttttttataaggatgttaagtttattttttgattaatggattttttttaattagaaataagtataatttatatttataattttttgttaaaatatataattttaaatattattttttttttttgtttgttagtttttattaattaatttggtttgaagaagaaaaaaaaatttagttaagggaaattaagtgtatagaggattttttgaagaatatattttgtagattatgtaattatagatatttgtagtattgtgaatttggattgtttgttttaattttttatagaattttttatagtgaattgtgttttggtagtcggtttttagtttgtagggatttaataagaatgggatgtaatgtaaaataatttatggatgatatggtataatgtgtagaatttgttttaaaagatttttagttgaaaaagtggtaggagtagattaagtgagtatggttaatttttgatagtttttaaaattttgtgatggatatagtaagatttattatatatttacggtttttgtgtatgtttgaaattgttattataagtagagttttttaaaagaggtataagaagtttattattgtttttattatagggatattgttaaagatttattttatttattattttgtaaattagtatatttttgataagaaattaagaatgattttaaaatttaaataatatttattttagttttgtttagtataaagtaagtatgtaataagtaatagttattgtttattgtgtaatgattttattagaatttatttgtgggtattagtagtttgatttttttggaatttggaggttttttttgatattggataaagtataaagaaaatagtattttttgtaaggttagttgtaagaggttttttggtagtatattgaatataggaagaatttttgaaagaatttttaagaattttagtgttttaatttagaaggtaaaaatttaatatgaagtattaaaaaaaaatgtattatgattaattaggagtataaagatagtattatgttttaaaatatatttaaatgtattatatttaaatatatttaaattttaaagatagttttatattttaaaatatatttaaatttattatttttgtaggttaaagaaaataagttatatgattattttgattatgataaatggtttaattggttaatatttgaaaaataataataattagaattatttttttatatttaaaattaattttatatgaatataaatgtggaaattttttaaagtgttaaatgaaaataagggatgagattagggaggaagaaaattattttgtgttttttggttttatttttgattttgttttatttttagagattgtagagtaagtaaattgtgatagtttttttatttttgtattttgatatattttttaattttttttatttatttgaatgtcgatttttttattgtattttaggttttattatattaattttttaatttttgtaataattagattttataataagaaaagattgtatttggttgattttttttataatgtatttattaatatttaagtgtgaattttttaaagtttttgtgataggttttttaaggtatggtaatattttttattttttttttgttgtattatattatattattgtgtttttgtgataataataaagaatttgattgttttttgtttttggtttttaggagggaaattaaatttttggaattttttgagtaatatgagtatttttgttatttatgagttttttggattatatttgggtttatgttaagagagaatttacgatgggaggttggttattagaaagattatataataaaaggattgggttttagagttagtttaatttcgacggagggtgggaggattagagattgcgtttaattcggtggtaaatgagttaattaattgtatttatataatgaaaattttggacgttaaaatttggtggagttttttggttggtgaatatatttatgtgttaggagggtgatataatttgatttatagagagaagatatagaagttttgtatggaagattcgtttagatttcgttttacgtgtgtttttattagtttggtttttttgatttgtattttttgtaataagtttgtaatcgtaagtataatatttttttgagtttggtgagttgttttagtaaattattaaattcgagggggttgtgggtattttttagattagtagttagttggttagaggagcgagtagtttggggatttttatatttgtggttggcggcggaagtgagggtaattttattggggttgaaatttgtagttagtgttgtgttgtattattttagttttttatttatttatatttttgttatttttttgtcggggttttgttgtgatgtttttatttgggtgattttataaaggttagagatgagggagggtagatttatttggagaataaatttttaggttttttgatattttttttttttttgagataaggtttcgttttgttatttaggttgaagtgtagtggtgtaatttaggtttattgtaattttgttttttaatttttatttttacgttttgggtttaagcgatttttttatattagtttttagggtaattgggattatacgtgcgtattagtacgtttagttttgtttttttgtttttttttttttttttgtatttttagtagtgaaagggttgtttaggttggttttaaatttttgagtttaagtaatttgttttttttagtttttttaaagtgttagtattataggtatgagttatcgcgtttagttaatatatatttttaataattttttatttattaattttttgttttggttttgtatttttgattttattagattatttttgttttggtaaatattaataatatttatataagtttagtttatatgttttaaagacgtttttttttatttttagaatttttttagttgtgtgtgtgagtacgtttggttttttattaaagagttttgtcgttttgatgtttttttttttgtgaatatagtaataaatagattttgtagaataaatgagtgagtaatttttttttttttttttttttgagatagagtttcgttttgttatttaggttggagtgtagtggagttattttggtttattgtagtttttgttttttgagtttaagtaattattgtataatagtgattattgttataaagttaagtatatattgtttataatttttgaattgaagtataaattttatttttttttttttttttttttttggagatggagtttttttttgttatttaggttagagtgtagtggtaggattttagtttattgtaattttcgttttttgggtttaagtgatttttttgttttagtttttcgagtatttgggattataggtacgtgttattatgttcggttaattttttgtatttttagtggagacggggttttattatgttgggtaggtttgtttcgaatttttgattttaggtgatttttttgttttgattttttaaagtgttgggattataggtatgagttattatatttggtttttttttttttttttttaatagaaatgggtttttttatttatttttatttggtatggtggtttatgtttgtaattttagtattttaggaggttgaggggggtgaattatttgaggttaggagttcgagattagtttggttaatatggtaaaattttatttttattaaaaatataaaaatttagtcgggtatggtggtacgtgtttgtaattttagttatttaagaggttgaggtaggagaattatttgaatttaggaggcggaggttgtagtgagttgagatcgcgtaattgtattttagtttgggtaataagagtaaaattttattttaaaaaaaaaagaaaagaaaagaaaagataaaaaaagaaatgggtttttattatgttgtttaggttgttttggaaattttaggtttaaataattttttttttttggttttttaaagtgttatgattatatgtgtgatttattatgtttagttttaaatatttttaattgtaagtgtgtagtattttatataatttaagtatagttttatataatgggttgagttagattaataaggttatagatggttggtttatgattattaggttggtgggtaaaattagttattaattttttatgaaaggttaggtatagtggtttatgtttgtaattttagtattttgggaggttaaggtaggtggattgtttgagtttaggagtttaagattagtttggttaatatggtgagatttttttttattaaaatataaaaaattagtcgggtttggtggtgggtgtttgtagttttagttatgtgggtggttatggtaagagaattgtttgaattcgagaggcggaggttgtagtgagtcgagatgttgttatattgtattttaatttaggttatagtgaggtaggagttattaagaaattattttaggtagatagagaggaaaaaggtttatggaaaattttttatagtttttgtttagtatgaaagttttggtttttagatttgggttagtaattttttatatgtaaacgttagttgttagaaattgggtttatttaataaggttatttttatttttgtttttttgtttttgtttttatatgtgtttggtagtatggtcgtttttatatatttttacgtgtgtggaatatgatatagttttatatttgtatattaaaaggttagggtgggagggttagttttttcgtcggttatatgaatgatatgtttggttaaattaattttttgagttttatgtagattagatattgttttttttatttatcgaatatagttggttggtattatttaagtgcggggttttatttttcggttttggagtttttttttttttgtttttgtataagggagtttttttttttttttttttttttttttttttgtttattaaatttttcgttttttaaaattattttacgtgtgttcgtgttattttatttaattcgatgtgagataagagttttggtgtttttttatttattagagttatattaatagagggtgattgttttaaaaaaaaaaaaaaaaaaaatttttttgaaaaatagaatttaaaattttaagtgggtaaatattatttttatttttttaaaaagttaataaatttttataattaatatttatggttttaagtaataagttgatagtttgagtattagttgtagaagataaaaaaaaaaattgaggtatttgtaagaagtttttgttagaaggaataagaggggttgagtattgaagtttgggttaggtgagttgttttttttgtttttttacgttttatattttagatattatcgatggggagtttaggagatgaggggtggaaggaggaggtgaggttgggttttttttagtttagggatgttgttttgaatgtttttattgaaggataaggaggaaagtgatgtttttattaaggttgataggttaaggaatgggaaagtatttttggaggtttttaggtcgattattgaatattttgttttaggtgtttaagttttatagtgtggttggtgggtgtgtttttggtattattttttttatgtgttgagttttttgggaagtaggtagtataaatgtgaggatacgttagtgtttcggggattttttattaagatcggtagttattttttttttaatttttttgttttttttttttagagatggagtttatttagaatttagttgtgttgttgtaaggtatattttgtttttttttttttttttttttttttagtatattaaattttttatattttagggagggagttattttagtttttaattgttttagagtggtgagtagtattttatatattttaagtatataaggaagaagtgtagtaggttggggattggtagaaggagttttttgggtagaagagttaggaaggtagttgggtaggaagtaatttgtatgggtttagtttaaggtattagaaaattagttttttttaaataattatagaggtttttaaacgtgttttatttttttaagttttttttttagggttttgttgtttttttttatttttttttgtttttttttttttttattttaagtgttttatttttattttttttttatttttttgttttttttttttttttcgggtttatttttggtttttttaggttttgataaagagttttttgaggtttattatcggtagttgaattttggttttttttttttgtttttgtttgttttcgtggatttttagatatgttttttgagtttgtgggtaggtattttagtatagttgtgggatttggggtttagagatttttaattagtttgtgtttagaattatattttaatagaatgattttttttgaattttattgatgtagaattttgttttttaaattttaaaattaggtttttgttatataagtaggaaaagttaggaacgtagacgtattgaagggtgaggggaatagaatttattgggtgaaaaaggaaaagaagaaaaaaaaaattttttagtaaagtaagaagagtttttgttaatagtatttttatttttagattgattttaggttatatataagaattgaagaggttaggtttttttttaattgtatatggtacgaatttttcgtggttttattttttttttttaagtttataggtaggttagagattttttggggatttttttttttatttattttttgtatttattaatatggtgaaattttgtttttacgaaaattgtgaaagttaattgggtttggtggtgtacggatgtggttttagttatttgaaaggttgaggttggagaattatttgagttcgggaggtcgaggttgtagtgagttgtgattgtattattgtattttagtttgggtgatagagtgagatcgtgttttaaaaataaatttaaaaataaaataaaaataaagagttgtagtttataatgtattattcggattagtgggaagtatagtttttggtagagtttagagaatgaattttgagggacgaggaggaataagaaaggaatttaatttgattgggttggttaagtatatatatttaataggttatagaaggagttatgaatatttatgaaagtggttttgaagtatatatattgaataaattagtatattgtatatgatttatgtgtatcgtagggtggagatttagtatttaaatgtattatagttggttaggcgcggtggtttatatttgtaattttagtattttgggaggttgaggtagatggattatgaggttaggagatcgaggttattttggttaatagggtgaaatttcgtttttattaaaaatataaaaaaaattagtcgggtatggtagcgggtgtttgtagttttagttattcgggaggttgaggtaagagaatggtatgaatttgggaggtagagtttgtagtgagtcgagatcgtattattgtattttagtttaagcgatagtgagatttcgttttaaaaaaaaaataaattaattaaaaaaaaataaatgtattataattaggttttatatattaaaaggtttttttaggatataagtaaatttaagtatgtagtatttgtaaattagttagaattagtttatggttagtagtttttttattaggagaaggttattgaaattagtttcgtgtttaatttaagttgtagttttggttgatggacgatttgtaagttgttttaattttgtttattttaaggttaatgttcgtttggttgttagagaaaaattaaaattttgtggtagaatattttttttttaagtgtaggggtgtgtgatttaattttgatttgttatggttttaagttttgtttatagtttggttttttattggtttaaatattttgttttgttagttttatgatttttggtttattaatgttggttagtggttgtttaaattataaaagggatgaggtatgacgaggcgtgtttgattttttatttttttttgtttgggaatttagtttttaaggtttttttggggtttttttggttaagagggggtttattaagttaattggggggtttaggattttatttttagtttataaaattattttattatagttttttaaaaggagtttgtgtttttttttgaaagaaagttgatattttttgttgttggaggttaagggtggtagggttatatataaattaggtgttagaagggttgtgggtagaggtcggagtagtttgattaaggtgggaaattttagggttgtttttgataatgaattgaggtggaaagggagaaaggtagttgttttgtgaatttattggagatattgagtagcggatagaaagtagatgttagggagtgggaatcggggagttgagtgggtttattttaaaaggggtagttttgaggcgtttttaattttttagtgttgtaggttttgtagttaaattttgtgttttatttatttgttttttaaggttgttatttagatggtttcgtttttaagtttttgatattgttgaggatttattttagttataggagtattatttatgggtagggtaggttagaaatgttagtgttttgggggtagtttttaagtgaaatgggatttggtgaagaaatattttagtttttttaagggtaggatgatttcgaggtatgttttatatagtagttttttgaaggttttagtgggattgagttaaggagtttattaagtttattgtttatcgatgtattttatgttggtttttgtttttttttgtttattttattaattatgttagggattttttttttaataatttttttgttttaaatttttgtttttagatttgtttttgaaggaaattaatttaaaatagatttttttggtaatttgtgaaagttgttgtatttttgagaataatggtggggttttgttttttgtttgtttgttttgagataaggttttgttgtgttgtttaggatggagtgtattgttatgattatagtttattgtagtttttattttttgagtttaagagattttgttgttttagttttttgagtagttgggattatagatgtaggttattatattcggtagaatagtgttttaaatgtataaaataaaatagataatgatagatgtaggagatagataaaggggagggtttttggagaattatttgtttgtatattgggaaaatggggtggagttacgggaagttcgtgtcgagtgtgtagtggtcggggaggagtttggtttttttagttattgtgtgtggtttggaattaatttgtggagtggggatttgttggtaggaattttttttgttttttgttgagaggttttttttttttttttttttttttttatttaaaaaattttattttttttattttttaaagtgtttgtttgtttaattttttttggttatgtgataagaattcggttttagttgaattgaggagtaaagttttgtattagtattgttaggttggtttcgaatttttgggtttaaacgatttatttattttagttttttaaagtgttgggattgtagatgtgagttataatgtttagttagtagtaattttttaaaagaaataaagtttttttttttaaatttatgatttttttttttttttttttttttttttaagagatagggttttattttgttgttttggttggagtaaatagttttttgtagttttaaattattgggatttattttagttttttgagtaggtaggattataggcgtgtgttagtatatttagttaatttttatttatttatttatttatttattggtaaagaaagggttttattatgttgtttaggttggtttcgaatttttatttttaagtagtttttttatttttatttattaaagcgtagggattataggtaagagttattgtttgtttagtttaaagttgtgatttttaagttaatatattattgttaaattaatttgtgttttttgttttttttttatttaattttgttttttttttatttttcgtattattttgtatttttaagttaggagaaaggattttgtgtttttttattttagaaatttgaatttagaatttttttgtagatattttttaggtttttgtttgttggagattggagttttttgagaggattaagggtgtggtggggagtgtttaaaggagtttagtgttttgagggtagttaagaagatagaggttttggattggatatcggttgaggtaggtggatttttgtggggtggagattatttttagttttatagttttaggtatgttaagggttattattaaggttttagaggagattagttgtttggggtattttaggaagttatattttgatatttggattttagagtttataaatatatttgtatttaaattagtgggtaagtaaagaagtttttgtttttgggagattttaggatgttggttatgagaatattatggatgggcgcggtggttcgtttttgtaattttagtattttgggaggttaaggcgggtggattatttgaggttaggagttcgagattagtttggttaatatggtaaaattttgtttttattaaaaatatagaaattagttaggtatagtggtaggtgtttgtaattttagttattcgggcggttgaggtaggagaatcgtttgaatttgggaggtagaggttgtagtgagttaagattatattattgtgttttagtttgggtaataagatagaaattttattttaaaaaaaaaaaaaagaaaagaaattatggattttaaaaggtttgaagtggagagttttgaagttattttagattatgaggttattttaagggtagaaggaagtatattaagatgataggaatagaagataggagtttgggtttattatgttagggagtttttatatttgttttggacgttttattttagatttcgtggataaagtagagaaataaatatttattttgtttaagttatttatttttaattttttgttttaagtaggttttttatgaagtttttagtttgatagtattaattggtgggttagaatttgtggacggtttttatgtatgtattttgtaaaattatttataagaaagagttgaataagttttgggattagttagagaagtgggtaaaaaaagagaggaagtggtcgagtgcggtggtttacgtttgtaattttagtattttgggatgtttaggtaggtagattacgagattaagagattgagattattttggttaatatggtgaaatttcgtttttattgaaaatataaaaattagttgggcgtgatgttatgtatttgtagttcgagttattcgggaggcggaggtaggagaattatttgaattttggaggtagaggttgtagtgtgttaagattatgttatcgttttttagtttagtaatagagtgagaatttcgttttaaaaaaaaaaaaaaaaaaaaaaaaaaagagagagaggaagtagtttttttattgtttttgttatgtttagaaggttttttagtataagaagagattatttgtattttaaatagtataataggtagtttgttgggtggtcggggaaattgtttaagataggatcgtattagaggtttttttttgttttttgaatattttaatttttgtgtaggaaggtttgggtttttttaggataaaataatttttaatattttatttgttttattaaatattaaataaatatatttgtaaaagatatagatatgaataataatgatataaagaatgataaagtgattttttaaatttgagattaattttatttaaaataatttaagttatttgtagttgttggtttgattgtaataattaatattggattatggttatttaatttattaatttaagaagaaattttttataattgtgatgattataaaggaaatataaatatggttaatttgtgttatgaaaaatggaagttaattaaggtatttgaaatgagtgaggagattgaggatgttttgaaggaaatgtaggaaggagaattagtttaagtgtatttatgttgaatttatatataaatttttttttggttggtaagagtttagaatatgatattatagtgtgtgaaggaggttgagaggaaatagattgttttatgtattgttggtagtagtgtagatggtatagttttgtggagtagatttgtaatatttattagaattatatatgtataaattttttgatttagagattttttttttgggaatttattttatagatttatttatataaaggtaaatttgtttaggtataaggttatttattgtggtattatttataataataacggattagaaatagtttaataatttagtaataggagattggcgaatatatagttttggtcgatttattaatggaatattatagagttgttaaaatgaaaaaggtaggaggaatagttttacgtggtgatagggaaggatatttagtatatttagttacgattttaaaaggaaggagtaagatgtatataatatgttttttttgtgtaataaaagaggaaataaaagtatgttatttatgtttgtataaagaaacgttgggagaataaataaggtattattttggtaaaaatggttattgacgagtaatgtgaggggaaaaagagagggtaagtgtggggtaggagtgatattttttatgtatttattgatgttatttttatttgaattatataaatgaaatattattttaaaaattaggtttgggtgtggtggattatatttgtaattttagtattttaggaggttaaggtgggaggatgacgagtttaggagtttaagattagtttggtaatatagtaagattttgtttttattaaaaaaattttaaaaattagttaggtatggtgttatatagttgtagttttagttatttatgaggttgaggtgggaggattgtttgagtttaagagttgaaggttttagtgagttattgtattttagcgtgggtgatagagtaaaattttgttttaaaaaatatatatagaattttaaaaatttatatttggacgatttattaaaattaaagaaatatagagggtagttatttagtaattaagaaataaggatatggattaaaaataatcgtattttgtttttttgattaagttttttttttggttttatgttttattttttataaagataaaatttttaaatttggagatattttagggaatttttgttaagaaaaatgttgataaattgatggatataggagtttataatgtaaaaaaaatagaaagttataaaatgttttaggtggtttgagaagtatgttatttttgttatttggggttataaaatgtgtatgaaatgttatattttttatttttatttaattaaatgtaatttgttttgtgttttatttagaagattgggaggaaatttaattttagttattagtggggttgttttttttttttaatatattataaaatattaggggtttaggtagtattagaaaagttgggagtaaggttaggtttttagtatttaggatagttaatttagttcgttttagttgttgtgatagaatattagagattaggtgatttaaatgataaatatgtttttgtttgtttttgagatagggttttattgtattatttaggttggagggtagtgttgtaatgttattttattatatttttaattttttaggtttaggtgatttttttattttagtttttcgcgtagttgggattataggtgtatattattatatttggttaatttttttttttttttttttttttagatatagtttcgttttgttatttaggttggagtgtagtggtataatttcggtttattgtaattttcgttttttaggtttaagtaattgttttgttttagttttttgaatagttgggattataggtgttcgttattatgtttagttaattttttgtatttttagtagagatggggttttattatgttggttaggttggttttgaatttttgattttaggtgttttgttttttttggttttttaaagtgttgggattataggtatgagttattatgttagtttaagtttttgtatttttgtagagatggggttttttttatgttgtttaggttggttttaaatttttgggtttaagtaatttgtttattttggttttttaaatttgtattaggattataggtgtgagttattatatttagttgaatgaatatgtattttttatagttttggagattaggaagtttaagatttaggtattagtagatttgatgtttgttgagggttttttttttgatttttagattgtagtttttttattatcgatggtcgagagagagttttggtttttaattcgttttataagggtattaattatatatgggggttttatttttatgattttagttaaatttaagtatttttaaaaggttttatttttaaatattattatattgggggttgggtttttaatatattaattatggggggatagagatatttagtttatagaagttattattgtttttttagttgtttttatttttagaggttatagataagttttggagtgatgttttttgggttaggtttagtatttttttttatattagtaatgtttatattatttatagtagaatttttttggggattttggtttttgtgtttttagttgggagaaattatggtttttttgggtattttttagtaattttttagtttgggaatgttttgggtagaagtgggggtttttttattcgtggggagaaagtattaaatttttagattttagagaattttaatttttgtttaagatatatttatagtttatttttgttttttttagtttaggtgtttgcgtataatttaaatgttattattatttattttttttatatttaagaaagagttttagaattgggaataaaaagtttagtaatttttttggtgaggggagtatatatagagtaataagaataaaataaaataattttatagtaaattattttgttataagtttggtatgggagttttgatgaattgtaatggaatgaagagttgggtaatgttgtagtcgtaattcggtaaagtgagttgaaggagatagagttttatagaattaagaagttatttattttgggtatgaaagttttggtttaggtgtagatatagttgttttagttatttattattgagtaatcgttattttaaatttagtggtttataataatagttatttttttatataaaaaattgtgtttgttagtttagtaattttattttgtttgatgttaattggagttatttaatgttattttcggtagttggttggtttggagtgtttaagatagttttttttatatttttgttatttttgtggggatagttgggttttgttagtggttggttagagtattatattcggttattttagtaggtagtggtagggaatttgaatttttttttttggggggaagaggggtatagggtttcgttttgttgtttaggttggtgtgtaatggtatggttatagttgattataattttaaaggttttaagtaatttttttgttttagttttttgagtagttgggattataggcgtgagttattattttcggttaatttttttttttttgtagatatggatttttattatgttgattaggttggtttgaatttttgattttaagtaatttttttgttttagttttttaaagttttaggattacggagtattattgtgtttagtttgaatttgaaattttttttttttttttttttttttgagatatagttttgttttgttatttagagttggagtgtagtggtgtaattttagtttattgtaatttttattttcggggtttaagtaatttttttgttttagttttttgagtagttgggattataggtgcgtattattatatttagttaatttttgtatttttagtagagacggtattttattatgttggttaggttggttttgaatttttgattttatgattttttcgttttagttttttaaagtgttgggattataggtgtgagttatcgtgtttagtttgattttgaattttttatatggtgatttaggtttttagagaatgttttaggagataggaggtggaaggtgttattgaattttgtgttggaagttggtttagtattatttttaataatttgtgtcgttcgagtagttatatagttatttagatttaaggggtttttattttttaatgggagaagtagtaaaggatatgtagttaatttttaaatttgtaatgaatagaagtagttttttttttttagttgattgttaggtgagttggggttggttttaataatggtatatataaaatttagtggttttggtgaagatattaagattttaaatttaattaaatgtttgtttggttgatgtgagtagtttataggttttattgttagatttattaatgttgatgtttatgtttaagagtttagttagtattttgtgaaggaggtagtaaatagggtttttaataatataaatttatttgtattagggtattttagggaagtagatttaataggagaaattagggttaggtacggtggtttatgtttgtaattttagtattttgggaggtcgaggtgagaggatcgtttgagtttaggagttagagattagtttgggtaatatagtgagattttatttgtaaaaaaagtttaaaaattagttgggtatggtggtgggtatttgtagttttagttatttaggaggatgaggttggaggattgtttgagtttgggaagttaaggttgtaatgagttaggattgtgttattgtattttagtttaggtaatagagtgagattttgttttaaaaaaaaaaaaaagaagagagagaaattagtagatgatatgatagatagataagtagatagattagatagatcgatttatcgatcgattaattaatcgatatatagattgatagatagaatgaggaattggtttatattattatggaggttttaaagttttatagtttgttattagcgaattgagatttaggaaagttagtaatataattttagtttatgtttataattttgtggattagaggaattaggggagttaatagtataaattttagtttaaggagagaagaagattgatattttagttttagcgcgtaggcgggaagaaatagtagtgaattttttttttttttttttattttgtttaggtttttagtagattagatgatgtttattatattggcgaagataatttattgagtttataatgttaattttatttagaaatatttttagagatatattaagaaatgttatttaatttgggtattttgtagtgtaatataattaaattgatatataaaattaattattgaattttatattttaaaaatcgtaatatttaatttatttttatttttgatgtagataaaaaatttatgagattaatttaggaagttataaaaaggtgattaaaaagaagatggagttaaggaagatgttaagtaggaaagagtagaaagtttttttttttttttttttttttgaaagatagagttttatttgtagtttaggttggaatgttggaatgtagtagtgcgattttagtttatttttattttttagtttttaggaaggtgggattataggtatgtgttattatattcggttaatttttgtatttttagtagagatggggttttattatgttggttaggttggtttcgaattttcgattttaggtgatttattcgttttggttttttaaagtgttgggattataggcgtgagttattgtatttagttatttttattttttaaaaaaatgtttttatataaataaaatatatatatagagaagtgtattaattttaaatgtatagtttaaagaattttcgtaaatagtatatgtatgtaattagtgtttagattaaggaaaggatatttttaggatgttaggggtttttttttgtgttttttagttattattttttttaaaggataatttttttttttattattattattttgtttggatttgagttttatataaatggaattatataatgtgtttttttatagttggttttttttattcgattttatgtttgtagatttgtttgttatgatatgtagttataggaatatttatttttagtgttgagaaatattttattgtatgtatatgttataatttttttttttttttttttgttgaaggttatttgggttatttttattttaggtagtgtgggttttagtgtttttttattgggagtagttttgttttttttgttttttaatgagtgttatttattgaggatattacggagagtgtgattgggtattatatagtgtttttaatttaggggtattaggttttttttggtttaaagacgaagtaagatagagttttttgtttgattttataaatttgtttgttatttttgttatttttttaggatttagtttagggatttttttttttaatatttataaatgtgtatattgttattatggtttttttgttttattagtataagggaatttttttttgttggaaggtgaggggatggttgtttttagtgtttattttttttaaatatttggtttatgttataaatttttttagtttttatgaggttttatgtttgaaatttatgaggtagaagatgttgtttggttttgttttttgttgatcgtttatttttttattttaattgttagaaaggttggggagtgggaggggaggagggagagatatagatgaaataaattagaagttttttttttttttttttagagatgaggtttttttttgttatttaggttggagtatagtggtaaaattgtagtttattgtagtttggaatttttgggtttaagtgatttttttgttttagttttttaagtatttgagattatatgtgtgagttatcgtatttggttagagaatattttaaaatgttagttttttatatttataacggaaaggatttggattaatttatttttgttattttttttgggtaatggatattgatggttagggatgtttttatttgtttttagcgggttttttatattttaataaatatatagaaaggtatttagttttatagtgttttagtttgtgttattggtttgtttggggttttaaatgttttattttttttgggtatttattattttttttggaatagagtgtaaaggttttttagtttagtggtttttttttagagtttggaagtttttttattatggtggttggatatttttttgagatattaatatgtgtttttttgttttttttgttttgttattgttttattttattttaggaagcgtttgtatattttggttttagaagattttgcgtagttttattaagagaagaagttggaaagaaaaaaaaagaagttggtaaggtatttagaggagatttttttagtatttgggttttttgttaggggagagaggtaagtatattggattgaaggaggtaaaagttgtttaagggagtggggggtggggggagatttttagatgttgtggaagggatgtggtttgggggtttttggagtagtgaggagaagttttgtttttatatagaattttatatataatagtggggatggagggaggttagggattttaaaggaaattagttaagaattttggttttattaattataaagatttttatttatattagttgtgtttgaaggttagaggtttagattttgaatgttttaggttgggttagatttttgggatggttattggattttataggagaagagataggggagtttttaataaaattttaattatattttttgtttgtttggttagtggatattaaatgtagatgatttagaaaaagaaagaattgtgagatgttgtggagttaatttaatgttattattagcgtttttttttttagagttttgtattttagcgacggagtttaaggtttagattaaaggttttttatttttggtaaggaggtttttatagtggaggtgaacgtttatatattatattttgagaattttttttttaaagtagtttttattttgtatgtttttttattttgttagagtaagtagttagttagggatgagtagggtaggagagggcgttttagatatatatttataggaatgttaggtaaatattaggtgagggttaggtagttgttaacgggttttttaaaataattggttatagttggtattagagataggtagttttttaatagaaatatttgaaattggtgattagtagttttttaataagattttagtaagtgattaaagaggtaagaattgaggttgttgtagatttttatggatttgttgttattaacgatttttattattgttgttggggaggaggttttaatagtatttattaattaaagatattttagttttttttttattttttttttttaaatattgttcggtttattttatgagattgttttgggttttttgagatttaggtaatgggaagagaaggttatggaagtggattgagaatgttgggtgtttagattaattatgttgtttttcggaaggtatttttagtaggatgtatagttgtggttattagtaaatttttttttttttttttgtaggtgttttagagaatatggatagggttgtaggtggttaatggtttaaagattatttagtgaagacgttgtttgggggaatagagtgtggttatatttaaggaaagaaggtataggtgaataggagaggaggtgaaggagaagcgagtaggtgggggttgcggaggggttgaggaaggttaggtagagttaggagattaatttagttttttggaaggtagtttagttgattttttattatgtggtatttgtaaaaggtggatagtagaggtttggggttagagagaggttggattagatttttattgtaaaaatttttttgttaaggtttaggtagggtgtttttaagtttgaattttgatttttatcgttgggatataggattttggaagaggaagatgttaaatgattgtatttggggagggaaagatacgtttatttttttttagttttaagttgttttgtgttgttgttatattacgtaattatagttataaattatatttgaagtatgatggaatttgaattatggtagtagtttaagttgattatattaatagggaaagttgagttatgattttatattgaatataaaaattaagttagatgtgtttatttatatgtatataaatattttggaaagttgagatttatagttttaagatggggaaagggttttttttggtgggattgttagaggtttttttatggaattgtacgttttagattaagttaaagttttaagtaaaataatttgttatgttatgtaggattggaagattttcgtttgttttagggttaatttatgattttcggtattttttgttttgaaatgatatttagttttaggaagaattggattttaggattaatttgtataggcgttttaggagatagtttgggtatgtaggttagtcgatgtgtgtcggggaagattgtttatatttgttttttagttttattgggtttgattataggttattttttatagtaaaggggagttagggtttttgggtaagggtagatgttgttttttatgtttttgaattagttaagaggcgttttagtaggaagttttgtttggtttatattgtaaaggaggtattatttattatgtagttttttgttcggagtattttgtttgtgttattgagaaatgttttgttgtagtaggagaggcggatcgagttatagttaagagtgtgttttgtttttatttgttgatttaggttagaatgatgtggaatattggatagttaatttattgggtttaaaaaatatagtaatataatgttttgggtgttttttggttgtgatgtgtattattgttttttggggagattttattatatatgaaattttagatgtttatttagtgattatgttaagtttttattgtttgtttttatatgttttttggagttggattttattttggtttaagatttttgatgaagtgttggtatggagtagaaatttttttaggtagaaatttttttttttttttgttatttattttttattagtattttattttagggatgttatcgtaggtttttttttatagtagtattatttttttaatttttaattttaggttattgttatagagtttcgtatttgatttagttttgagaaagtgattagagtgtgatcggaaaaaattgttagtgatttttaaatatgtagtataaagttatagtaaatgtttttaaaaaatagatataagtgaaataggttagtttaggggtttttaatatagagtaatgatagatataatattagagaaaattaaaaagtaatgttttataaagggagaatatttttaaagatatttttagaaattgaatataaatgtaaaagatgaatagggttatagttgtggtttgttgggttttgatttagggtatagttaaaggtagttgggaagttaagttttgttgagtattgagtggtgagatagaattaaattgtttattgaggtgggggattagtgttatggttattgtgaaaatattagggatttagattttttttttgtttatatttttattttttttaagaagattgaaatagtttgttattaatttcgtttgggattgtggtttagggaggttcgtggttattaaacggtattatatttgggtttaattgagttatttatagttatggggttggatgtgagttatttttagggttattttagggtaggagtttcgattgttatataagatttagttttgaatattggtttttgggaagggtaattgtatagttattaggtagggaggagtgaggaataagagaagggagatagagaaagtttggaaatgaatttggaagttgaaattttaaaatatataaaaattaatattgagaaaggtagttagtaatattaatatttgatgtatgataggtgaagtgaaaagaatataattattggaaagagtttttagtatttttaaggaggtagttaaatatataatgtttatttaaaaattaagttattgtgagattataattaggtagaaacgtgttgttatataataatggaatagaaaaatattatgtaataaatggtttaggagaaataattattaatatttgggaaaatatatatagtagatgtaaatttttattttatttaatatattttgagtaaatttaaatattttttaatttttgaaaagggtaggatgttttaaattagttgaaagaagttaggtgtgttggtggcgtaatttttagttatttgagaggttgaggtaggaagatcgtttatgtttagaaattcgagattcgtttgagaaatatagtaagatttttagttttttaaagaaaaataaaattagattttaagataaatattatataagaaatatgaaagtaataagtaaaatatgggaaaaaagtaaaaaaataaattaattgaaataataggttaataaaagaaaggaatatatgtatagatttaattataaaaagtttttaaattttttttttttttttttgagataaagtttcgttttgttatttaggttggagtgtaatggtataattttggtttattgtaaattttattttttatatttaagcgatttttttgttttagtttttcgagtttttgagtatttggaattataggtataggttattatgtttagttgattttttgtatttttagtagagatagggttttattatgttggttaggttggttttgaatttttgattttaagtgatttatttttttcggttttttaatgtgttgggattataggtgtgagttattgcgtttggttaatttttatatttaatagaaaaaaatggaatgtaaataaataaggaaaatgttggtaatagtttttgaatttagtttttttgggtatgattttgggtaagttatttgatttttttaggtttttatttttttcgttatacgagattaattattgtatcgtgaggtaggattaattgaattattttatttaaagtttttagaatagtaattagtatttagaaaatattttatagttatttgtattttatattgtattgtgtgagaaatttagatatagataatttataatagaaatattataattaattaataattattaacgaataatttaattttattaatattgaaaaaaatttaattttttttttgtttttttagttgatagattgttaaaataataatagtgtatttttgttttaattttggggttttgtttttaaaagtttttttggatgaaaatattgtgattaagaaatttaggattttatgaaaagttagggatagggaatattgaaatttttagaaaatttatgttttttaaaatttttgcgttttttatgttttaaaattatttttagttaggtacggtggtttacgtttttaattttagtattttgggaggttaaggtaggtagattatttgaggttaggagttcgagattagtttggttaatatggtaaaatttcgtttttattataaaatataaaaattagtaaggtatggtggcgggcgtttgtaatcggaggttgaggtaggagaatcgtttgaatttgggaggtagaggttgtagtgagtcgagatggcgttattgtattttagtttgggtgataaagcgagatttcgttttaaaaaaaaaaaagttattttttatttttattaaaatatatttataaagagagtattaattttataaaatttagattggtaattgtttattgaataattatttttattaatttttttttattggagtatagttttttaaaattttttttttgcggttttagtgagatgtttgtaaattagttaagtgggtttataaggaagaattgtggtatttgtttgtatatggttttttatttaaatattgcgagtttttttagttattagtggttgtatgtaatggataattataaaatagagaaagagaaagtgatttaagcggaacgtgttatggaaggttgtattaggaagagatgtttgtgtattgtttggaatgagttagtggttttagtttagggattttggtttattggatttagggatgggttaggtacgtgtcgtttggaaggttttgtaggtagttttaatgtgtattttgttatgaatttgcggaagaggattggattagggaagggatatttgattttttagttttaatataaatgagggtttttattttttgggttttaattttttttttttattgtaaaatggaagagttggattaaagtggaattttcgttatatgacgaggtagtataatatgcgagaaagtatataggatttagggttaggttattggagttggtgttttttttagagttatttttttttttttttatatttatatttattttttttattttaaaatttattttttatttgtttttatttagttttttaattattgttttttttttttttttttttcgagatggagtttcgtattgttatttagtttggagtgtaatggtgttattttggtttattgtaattttcgtttttcgggtttaagtgatttttttgttttagttttttaagtagttgggattataggtatttattattacgttcggttaatttgtttttttttttttttttaaattaagtaattttttgaaattgaataggtttagagagatttttgttattaatttagatgtttattattttttattggagtaatttttatagttttttaattatttttttcgatattagtttttgtgttttttttttttttttgagataggattttgttttgttgtttaggttggtatgtagtggcgtgattatgggttattgtagttttcgttttttgggtttgagtgatttttttattttaattttttgagtagttgggattataggtatgtattattatgtttggttaattgtttaaaatttttgtagagatgaggttttattatgttgtttaggttggttttaaatttttggtttaagtaattttcgtatgttggttttttaaagtgttgggataatagatgtgagttattatatttaatttttgatattagtttagattttttttaatttttttttgtatcgttttttggtatgtattttttattgttgttgaaatttttggttgattataggagggtatattttttttattttatatgttagttattttattagattattaaaattttggtagttattagtgagcgatttatatttttgtaacgtggtttttattattttattgtttttttttttttttagtaaatttttaatgttttttgtataagaaatgggttgggatggttgggcggggtggtttatattattgtattttagtttgggtaagagagtaagattttatttttaaaaaaaaagaaggagaaggaggagaagaagaagaaggggaagaggaagaagaagaagaaggagaaggagaagtgaaagaagaagaagaagaaatgggttgggatgttattaagaagttttgttattttggtttattttttttttttttttgagatggagttttattttgttatttaggttggagtgtagtggtgttatttcggttcgttgtaatttttgtttttcgagtttaagcgatttttttgttttagttttttaagtagttgggattataggtattcgttattatgtttagttaatttttgtatttttagtagagacggggttttattatgttgattaggttggttttgaatttttgattttatgaatcgtttgttttggttttttaaagtgttgtgattataggcgtgaattattgtattcggtttattttggtttattttttgtagttaataaatttttaaaggatttttgtttttattaggagttgtattttattttatatatttaggtattgagtgtttttttgggttataattaaagagttttttatggtatttttattttgtttttgtgggattaaaaattaagattagaaagttttttgaaagttggaattttgttttatttattttttttttttagtttttatatggtgtttggaatgtttgttgaataaataaatttatgtatttagaataaatattagaaatagatttttaaaattttttagagttaaaaatatgtagaagtataaaataagtaatgaatgtttttatttttttagttttttttttgttataatttaaattttataagttttaaattatatttaaaagtaatcgaaagggataagttaatttttagggattaatgttatttatttttagattttataggatagttagtattttttttgataaaatatgatggtattttagtttaataatgttaatattagttataattttttattattttttttatttatttcgagatttaagggtttaatagtaaggagtttattttaaaggaaggtgtgtgttagaagtaggtagagatacgtttatttttaatttttagaatagataattttaaatgttagttgacgattttagtgtggttttttggttattaggtatagataaatttttttttgaattttaaaattttaaagatgggttttttttgtttgtgtataaaaagttagttaggagtaagaattagaaatgagtttttttaggggtatttttattattaattatttagagttttttttttgtttttttagagtagtagttattttttttgtttattttaatgagtttagttatgttatttggtggttaaaataaattgaaaatatgtaattatgttgttagaaagtgtgaacgtgttttttttagagttatttttttttattttttagttttttttttatttttcgtgagtatttattatttattatataaggagtattagggtattgattttgatggtgtttgtttttttgtatggaaaggtaagaaagtttggttttggtataagtgaaattggttaagattaaaagaaaaagaaggataagttagggataggatttttgtttatgtttaaaggaatagaataatgtttttagaagaaagagtaagagtagaagttagtgtttttagtttattagtaagtagtatggaatttgattaggaaatagtagaacggttattgttaagtgggaattattataatatttgaaaaaaataataataatagtaagagtagttgttttaaatgtgtttaaattttttggtttgaatggattatatttttaagtattaaaataaaaattaattgagagtatttttaagttattattaacgatttttgagaaattataaagaggtagaaaggtattagaagttggagattgtgtggttttgatttttaaagatggaaaaaaagatgaatgttgaaaagtatagattaggttaggtgtgggggtttacgtttgtaattttagtattttgggaggttgaggtaggtggattatttgagtttaggagtttgagatgagtttgggtaaaattttatttttataaaaaatataaaaattagttgggtacggtggtttacgtttgtaattttaatattttgggaggtcgcggtaggtatattatttgaggttagtagttcgagattagtttgattaatatggagaaattttgtttttattaaaaatataaaattagttaggtgtggtggcgtatgtttgtaattttagttattcgggaggttgaggtaggagaattgtttgaatttggatggtggagtttgtagtgagtcgagatcgtgttattatattttagtttgggtaataagagtaaaaattttattttaagaaaaaaaaaaaaattagttaggtgtggtggtgtatatttgtagttttagttatttgggggattgaggtaggaggattatttgagtttaggaagttaaggtttgtagtgagttaagattaggttattgtattttagtttgggtgataaagcgagattttgttttaaaaataaaaaagaaaagaaaattatagataagtggttttggtaatgattgtaggtaaaaatttttaaatgagatatagaaagatgttttgtaaagtgtttcgtgagtttcgagaagagttgagtatagttatttttaagtttaagtgatttttttattttagttttttaatagttaggattataggcgtgttattattttttattaattttttaatatttttttttcgtttttcgatttttgtttttaaattttttagaagatttgtttttatgattttgttggagattatgttttttggaaatagatattgagataaagttgggatgtaagatgttaattaggtattaatatttgtgaataagggtaaggaagtaggagtgggtagagggagaagttaaattgagttgtaggtttaattatattttttataattttgtagagagtttggggtagtattgtttattaaagtaaagtaagttgaattgaaagagttaggtatttatatttagttttgtttagttattatatggagttgttaggagaaagggtgtgattaggaagagggattaggtagttttttgtagttaggggattttgaaggagttgatggttggaggttgtttgttgattgtttttttatagttgggtaataagtttttttttgggggagatttgagtagtatatttttatgtttattacgttttttttattattatttttttttggtattattgaaatttattttttattttcgtttttattttatttattttatttttttgttttacgttaaatttagtgggttttttttggtttttattttatagttgattttttttttatttgttgaagttatcgatttttatagtaattttttttttttttttttgatttttttatttatattttgtcggtttgtttaggggttttgttttttatgtattatttaagtattgggattttattttgaatttattttttttttttttcgtatttttttaggcgattttatttattattagggttttaatttttgtttatatggtagtgattttgaaatgtattttttagttattttttttgttaggttttcgatttttatatttaattggttgttggttatttttatgttaagggttgttagaattgtgatattttatttttttttttttattgtgtttttattttaatttttttagtgtaagaaattagggattttttgaatttgttttgttaagttttttttttcggtagttattttcgttgggtttagtttgggtatgggtatggaagtatttcgaatagtattaaggattttgtatatggagatttgtattattgatatataaatagttgatgttggtgttgaaattaaagaatatttattattgattatatttattatttgtttaattagatgtgaatttttgatttagtgggtttataggaaagagttatttagtattttttaggtataggtgatgagagatggtatttatttattttatagtttgaagaatttgtaaagaaaatttgaagaaaagagttatttgggttgggtacggtggtttacgtttgtaattttagtattttgggaggtcgaggcgggcggattacgaggttaggagattgagattagtttggttaatagggtgaaatttcgtttttattaaaatataaaaatttagtcgggcgtggtggcgtatgtttgtagttttagttattcgggaggttgaggtaggagaatcgtttgaattcgggagacggaggttgtagtgagttaagattgcgttattgtatttcggtttagcgatagagcgagattttattttaaaataataataataaaaaaagagttttttgagtaggtagtttttagttatattttttatttttaggtttatatttgtgtggtaaaggtttaaataggaggtatttttgaaggaaaattaattttagtttatttaaatatattatgtttcgtgtatatatgttttttttttttaaatcggaatttttagttaaatttaaggaataattattaagtaaatataatatgataagagtaaggttaagtataggatagtttttgttttaaggaatttaaggtgaaaggataagtttaatggaagcgtattttagtttgttgatgagtataaaagttatagtagttaagtgttatgggttttagagaaggaaagtgttttcgtgtaggttggttttataaaggtttttgagataggtttaaaggatagattagattttaggaagtaagtataagataggaataagtaagaaataatgatgatatataaggaatggagaggaaagaatgttattagaagaatatttttagagaattgtataataaataaagagtaatggtaaggaaatttttttatagttaaggttaaatattgagattatagaaatattttgggaggttagagagaggtaacgttatgggggtaagattggttttttgtttgattggttttttttggggggggcggttaggttttttttttggagaaggagtttttttttgttatttaggttggagggtagtggcgtaattttagtttattgtaattttcgttttttaggtttaagcgatttttttgttttagtttttcgagtagtttggattataggtaattattatttcggtcgaatgatttttgtatttttagtagagatagggttttattatgttggttagtttggttttgaatttttgattttaggtgatttatttattttggttttttaaagtgttgggattataggtatgagttatatatttagttagattgttaaaataatattattataaggaggtgggtagaaaaggttaaaattattgttttattaattttttttaggttttagtttagatttaaattttttttagattttttttttttattattatgggtagtacgggtgttgtggtttcgagattttttttttatttagttttttgaaaagaataatgtttattaaaggtttgttgggagttgatttattatttttggtttggtagaatgtttttttaaggattttttgagtttaggaatttaagattagtttgagaaatatggaaaaaacgtatttttataagaaatgtaaaaatgaatggggtgtggtggtgtgcgtttgtagtttttaagggttgttagaatttaggaggttaagataggaggattgtttgagtttaggaagtcgaggttgtagtgagttatgattatattattgtattttagtttgggtaatagagtaagattttgttttaaagaaaaagtttttttaatgttgtttatatgggtaatttttttttatttattttagttgtaattaagtgagaatattttagtttttgtttttaaatgaaggaagtgaaaatttgtgaggataagaatgttttgggtttggtgatttttcgaagtgagtttggtagtaaatttttttatttgttttgggaaagttttaaaaaaattagagtatgggatattgatagtggttataattgttaacgaggttagggttttaatatatgacgtatgttaagtagttaaaattttttattttatagaaagagaaattgaagtttaaagatgttatgtgtaatttttttatatggagatatagtttgagtttagttttttaaggttttggtagggtttgagggagtgggtaatatgggtatggtttgtatatatttatgaattttgtatttgggaagtaatatggagaaatagtttgtaaggaaggaaaagattagatattatttattgtagttttaaataaaattatatagaggttaggagtagtggttgatgtttgtaattttagtattttgggaggttaaggtgggtgaattatttgaagttaggagtttgagattagtttggcgaatatggtgaaattttgtttttattaaaagtataaaaattagtcgggtgtggtggtatacgtttgtaattttatttatttaggaggttgaggtaggagaattatttgaatttgggaggtagaggttgtagtgagtttgagaggtgatagtttgttagtagtttttatagtttttattcgttttgggcgttttttttgtttgggtttttattttggcggtatttgaggagttttttagtttatcgttgtattatgggagtttttttttgggttggttaaggttagagtcggtttttttagtttgtagggaggtgtggagggagaggcgcgagcggaatcggggttgcgtgtagtgtttgcgggttagttggagtttcgggtgggcgtgggtttggcgggtttcgtattcggagtagtcggtcggttttgttagtcgtaggtagtgaggggtttagtattcgggttagcggttgcggagggtgtattaggttttttagtagtgtcggtttatcggcggtgcgttcgatttttcgttaggttttagttgttttcgtacggggtagggttcgggatttgtagttcgttatgtttgagttttttatttttttcgtgggtttttgtgcggtttaagttttttcgacgagcgtcgttttttgttttagggtttttagttttatcgatcgtttaagggttaaggagtgtgagcgtatggtttaggattggtaggtagttttatttgtagtttcggtgttggatttattgggtgaagttagttgggtttttgagtttggtggggacgtggagagtttttatgtttagtttagggattgtaaatatattaatcggtattttgtatttagtttaaggtttgtaaatatattaattagtattttgtgtttagtttagggtttgtgagtgttttaattgatattttatttagttgttttagtgggtttttggagaatttttatgtttagtttagggattgtaaatatattaatcggtattttgtatttaatttaaggtttgtaaatacgttaattagtattttgtgtttagtttagggtttgtgagtgtattaatcgatattttgtatttagttgttttggtggggttttggagaatttttatatttagtttagggattgtaaatatattaatcggtattttgtatttaatttaaggtttgtaaatacgttaattagtattttgtgtttagtttagggtttgtgagtgtattaatcgatattttgtatttagttgttttggtggggttttggagaattcgtgtgtttatattttgtatttaattaatttgatggggacgtggagaatttttgtatgtagtttagggattgtaaacgtattaattagtattttgttaaaataggttattcggttttattaattagtaggatgtgggtgtggttagataagagaataaaagtaggttgttttagttaatagtggtaatttgtttcggtttttttttttagtgtgtaagttttgtttttttgttttttgtaataaattttgttattgtttagtttttgagtttatattgtttttgtgagttgtaatatttattgtaaaggtttgtagttttatttttgaagttagtaagattataaatttattagaaggaagaaatttcgaatatatttgaatattagaaagaataaattttagatatgttattttaagagttataatatttatcgtgagggttcgtggttttatttttgaagttagtgagattaagaatttattaatttcggatataagttaagattatattatattgtattttagtttggtaatagagcgagattgttttaaaaaaaaaaaaaggtcgggtgtcgtggtttatttttgtaattttagtattttgagaggttgaggagggtggattatttgaggttaggagtttaagattagtttagttaatattgtgaaatttcgtttttattaaaaatataaaaaaattagttagacgtggtgggcgtttgtaattttagttatttaggaggttgaggtaggagaatcgtttgaatttggagtagggttggatggggggtagaggttgtagtgagttgaggttaggttattatatataagtttgggtaataagagtgaaatgttattttaataaatattgtgtttggtttttgagtaataaaaatttaatataatggtttaattttataggtgtttattttttttagttatgaagaagatttgagtaggtagtttagagttgatatagttgttttaattattagagatgtaattttttgttagatgtttttatatttatttttttatgttatatgtgtaagatggttgttttgtttttagatattatatttatattttaggtagaaaggagaaggaaagagtaaaagatgtgtttcgaataaatttattttaaaaataaataaggggaggggtagtaggagaaaatttaaaaagaagaagaagaaaaataaaaataggaaagtcgttgtttttttaaaagttttattaagtcgatttttatcggtgatttattatttagttatgtggttatttttggatttaaggtagtttgaggaggtgagtgttttaaagaggtatatggatgttatagataaaattaagtttttatggttgaaggagaagaggacgatagagtttggggaggtagtaggttacgtttgttatagaagatataaagatatggagttatacgagaagatgggggaggttgttaaaaaagtttattgggtataggtgaggagtaggtgatattggagttgttttatttgaggagttcgtatttgtaatggtttgtgtttttgtttttgtgggtataggtataaggttgatgtcgagagagtgagttgtttttgttggggtttagaatataatattttaaagtatggcgatgagtatttaattaaaggatattggaaggttttagaagtagttttagatttaaggtttttttgatttgtttttgtttttttgttttttttgtttttcgtttttttttgaagtgagttatagaaattagaatttttttttttacggtaggttttagaaattagaatttttttttttcgaagtaaaagttataaaaattggaattattattttaaattttttttgattttttgtttagaagatggttataaagaaatttttagttaggtgtggtggttcgtatttgtaattttagtattttgagaggttaaggtgggaggattatttgaggttaggagtttgagatcggtttgggtaatatagtaagatttttatttttataaaatttttttttttaaatttatttaagcgtggtggtatatttgtagttttagttatttaggaggttgaggtgggagggattttgttttggttgtgattgttttattatagggagtgtttatttgtgggttgttttttatatattaaagtatttttagaaagggttaatattagttttggaaaaaaggaggaagagttacggagagtttttttttattttttttttatgtgatgtgagagtgtatatgattgtgtgtatatatatatatatatattatatatatatattttataggtatatagggttaagaatatgttgggtagagtttaagttattgaatgttttagtaggaattatgatatttaaaaataggatagttgataagggggtttttattatttatagtttttggaattatatgtaattgtattttggaaatttaataaataaatagttagtatggaattaaggaattaagtttggtgaagtttaaagaagttgatgttatttataagagtaaatagagaggaaatcgggcgtggtggttttacgtttgtaattttagtattttgggaggttaagacgagtagattatttgaggtagagagtttgagattagtttggttaatatgatgaaattttgttttttattaaaaatataaaaattagttgggtgtggtggtaggtatttgtaattttagttatatgggaggttgaggtaggagaatcgtttgaatttaggagataggggttgtagtgagttaagattatattattgtattttagtttgggcgatagagtaagatttttttttaggaaagaaaaaaaaaaaaaagtaaatagagaggaaagtataggttagggtaaagagttttatgtagggttgggcgcggtggtttacgtttgcggttttagtattttgggaggtcgaggcgggcggattataaggttatgagatcgagattattttagttaatatggtgaaatttcgtttttattaaaaatataaaaattagtcgggggtggtgggcgtttgtagttttagttattcgggaggttgaggtaggagaatggtgtgaatttaggaggtggagtttgtagtgagtcgagattatattattgtattttaatttgggtaatagagtaagattttattttaaaaaaaaaaaaaaaaagagttttatgtatgattcgtgtataatgttgcgggtatttggagtgtagttaatagtttttttgtagagatttagtgtttattgtttttttttttttttagtagaattttaattttattttgtttagtaaagttttatgttttaaatttttttttgttttaaattgttatgtaggtaggagtggtggtgtggtatagggttggttaatgagatgttagtttaagttatgtaaaggggatttttagaaaagtttttttttaggattgatttaattggtatgggttttttttgttttttatttttttattttttttagtttgaaataaaattatgatggtttgaattttagttattaattggagagtatttaattatttttttagtaaatatatgttaggttttgtttttagttttaggaatttattataaagaaaatagataaaaatttttggttttaaggagtttatagtttagtgagaggaaataaattataagtaaataaatatatagtattttagaatatggtaagtgttaaggaaaataaattaagaaatgagatttttattatttttagggatatttttattttatttttttttgttgtttatattagagtgtagtggtgcgattatagtttattgtaattttaaatatttgggtttaagtgatttttttgttatagttttttgagtagttgggattataggtgtatattattatatttggttaattttttttttattttttatttttgtagagacggagttttgttatattttttaggttggttttaagtttttggttttaagtgatttttttattttaattttataaggggttgggattataggtgtgagttattatattatttagaaatgagattttttttatttttgtttgtttgtttgtttgttttgagatagagttttattttgttatttaggttggagtgtaggggtatattttcggtttattgtagtttttatttttaggtttaagtgattttcgtgttttagttttttaagtagttggagttataggaatatgttattatatttagttattttttttttttttttttttttttagtagagataggattttattatgttggtcgggttagttttaaatttttgattttaagtgatttgttagttttggttttttaaagtgtagggattataggcgtgagttattgtatttcgtttagaaatgagatttttgatgttcgattaagttagggtggtggtttagaaggttggatggatttgggggttgtaaaggtagttagggtttgttttaattaggtgtggtaagacgtgtagatataggaattatttttatggaggaagatatttatttatagttttttagaaatatgtatgaggtatggtatggcgtgtaggggtgttttatggggaagtatttgagttagttaggaggtagtgggagtgaaaggaaaatgtgggtaagagtttttattgtggttttataggtaggagtgtgtaggtaggtaagtaagtttaggttcggttagtttgaataattttagtagtttttggggtataggggttgtttttagttttttagtattggttttgggttgattaggggaattgtagttaggagtggtagagtttgatgaaggtggtggttgggaggatggggtttagtttggttgatttatatatgataggcgagttttttgtttttaggaattagtttaatttgggagaggtagttattttagggttagtaagattttacgatgtggaagtattagaatatagaaattagaaaatatggttaattatattaggtttttgttaatattgttatgttattaggatttttgtttttatttttagatttattttaaatgtagaaaaattaaatttttaattttttatgttattgttttttaggtttttattattggttaggtgaatgttaggtttgtattgataatgattttaaagaagattttttttttatacggtttagtaatcgatttttagattttatttatataaataggttgttagttaaataagaaaaatagtaagataagtaatagattttttatagagtaattatttttatttatgtgcgtgtatatatatataaatatatatattagtgcgaaaataaaatgattttttatagattttttttgaagattgaagattttaaaatagtttgaaaaaaagttttaaaagtggttttgaagttagttttatattaatgtattaaatattaatttttttttttttttgagatggagttttatttcgttatttaggttggagtgtagtgatgttatttcggtttattgtaatttttgtttttcgggtttaagtgattttgttgttttagttttttaagtagttaggattataggtatgtattattatgtttggttaatatttttgtatttttagtagagatggtgttttattatgttggttaggttggtttcgaatttttgattttaagtgatttattcgttttggttttttaaagtgttgggattataggcgtgagttattgtgttcggtttaaatattaattttatatgaataaaaagagaaacgaggatatatggagagagtaaaagagaagtgaggtacggtgagaaattgggaagggagatttgagtttttgtttatagcgaaggttgaaaatttagttatttgtaggggtaaagtagaaaatgtaaatgaggtagtaggtttgggataagaaagatttggtttttgttttttgttttttttttttttagtaaagatataggtagaaattaaaatttgtttgttagaggaaaaaataattatttaagttaaataataaatgttaattggtatttttttttagtgttaaggaggttaggaggtatggagtgggtattggtgaatagagtggggtagttatcgtttagttttattaattgttattagtaatcggtgtaggtcgtatgatgttagatagtttgatttttttttaagttgtaaaattgggatttttgtttagagatcgggttttattttagtttggagtgtaatggtattattataaaatattgtagtttggaatttttgggttgaaataattttttttttttagttttttaaattaaattgtaggtgtgaattattatatttagttgatttttattattttttgtaaagatagggttttattgtgttgtttatgttgtttaggataaaatttggatttttatgtgaaatttttaatttttaattgttgagattgaagatttttttttttttttttttttggagttagggttttgttttgttatttaagttggagtgtagtagtataattaaagttttttatagttttgattttttgggtttaagtagtttttttagtttagtttttttagaagttgattatagattataggtgtgtagtattatgtttggttaatttttgtattttttataaagacggggttttattgtgttgtttaggttggttttaaatttttgggtttaagtaatttttttaattcggttttttaaagtgttggagttatacgtatgagttattgtttttagtttttgaagataatattttggataaacgtttttttagtaaattatatgtttttgtagagtagatatttaggtagtaggttatcggtttgtatttttattatgttgaataaatgatataggaagttgttgtaaagaaaggaaggggaaaagtaaggggttagttgatagtaagaaagattgggagacggataaggagagatttaaggtgatgggatgaaaaaagaagaaaaaaaaatattgatgaatgcgattgagaagagattgggggtcggatgtagtggtttacgtttataattttagtaggcgtgaggttaaggtaggcggattatttggggttaggaattcgagattagtttggttaatatggtaaaattttatttttattaaaaatagaaaaaaaaagttaggtatggtggtatgtgtttgtagttttagttatttgggaggttgaggtacgagaattatttgaattcggacggcggcggaggttgtagtgagcggagattacgttattgtattttagtttgggtgatagagtgagattttattttaattaaaaaaagaagaagaagagattgagaaagaatgaagaagagaggaagaaaatattggggtttagaaaataatattttaaagtgtggtattttggtatgttgaatattttgaattaaaggatattgggaagatttagaagtagtttcgaaattaagatttttttgattttttgttttttttgtttttcgttttttatttttttttgaagtgagttatagaagttagaattagttttttttaaggttatagaaattagaatttttgttttttaaagttagttataaaaattagaattattttttttattgttttttaagatatgattataaataaatagtttgatttacgtttgtttaatggtgggttataatgagaggtgatagcgtgttggtagtttttagagttttcgtttgtttttgttattttttttatttgggtttttattttggcggtatttgacgagttttttagtttattattgtattgtgggaatttttttttgggttggttaaggttggagtttatttttttagtttgtagggaggtgtggaaggagaggtgcgagcgggaatcggggttgcgagcggcgtttgggcgttagcgggagtttcgggtgggcgtgggtttggagggtttcgtatttagagtagtcggttagttttgtcggtttcgggtaatgagggatttagtattcgggttagtggttgtagagggtgtattgggtcgtttagtagtgttagtttatcggcggtgcgttcgattttttatcgagttttagttgttttttcgcggggtagggttcgggatttgtagttcgttatgtttgagttttttatttatttaaagggtttttgtgtcgttcgagttttttcgacgagtattattttttgttttacgacgtttagttttatcgattatttaagggttgaggagtgtaagtatacggtataggattggtaggtagttttatttgtagttttagtgtggggtttattaggtgaagttagttgggtttttgagtttggtgaggatgtggagagtttttatgtttagtttagggattgtaaatatattaattagtattttgtgtttagtttaaggtttgtgagtgtattagtttatattttgtatttagttgttttggtggagttttggagaatttgtgtgtttaaattttgtatttaattaatttgatggggacgtggagaatttttgtatttagcgtaaggattgtaaacgtattaattagtattttgataaaataggttattcggttttattaattagtaggatgtgggtggggttagataagagaataaaagtaggttgttcgaattagtattggtaattcgtttgggtttttttttagattgtggaaggtttgtttttttgttttttgtaataagttttgttgttgtttatttttttgggtttatgttgtttttataagttgtaatatttattgcgaagatttgtagttttatttttgagttagtaagattatgaatttattagaaggaagaaatttcgaatatatttgaatattagaaaggatagattttagaagcgttattttaagggttataatatttatcgcgagggtttgtggtttcgtttttgaagttagtgaaattaagaatttattatttttggatataataagatttttattttagaggggtttagttttatatttggttggtagaaatgttataatatagaggtcgagaagaattcggatagataggtattgttggatttttttaggagattatattttttttgttttataatgtttttatatgattatttattttttattaattttaagtataaaaaatgagaattttttttgtgggttttaatttttttttttttttttttttttttttttttttttgagacggagttttgttttgtcgtttaggttggagtgtggtagtgtgattttagtttattgtaatttttgttttttgtgtttaagtaatttttttgttttagttttatgagtagttgggattataggtgtatgttattatatttagttaaattttttttttttttagtagagataggattttattatattggataggttggttttgaatttttgattttaagtgatttgtttatttcggttttttaaattgttgggattataggtatgagtcgttatattcggtttttgtgggtttttattttaaaggttatcgtgatatataaaatttggatttaataaatgttttttttttattaatttgttttttgttagaggatcgtggtcgagatttttatgatggagagaaaaggtattatagaaaaggtatgtttttttttgtttttaaaagggtaaggaagatggagaagaaagtgagaaaaaggagatttgaagagagaggaggaagtgggttgttataggtagagggtggagatttaaagttattttataggttcggtatagtggtttacgtttgtaattttaatattttgggaggttaaggtgagtgaatcgtttgaggttaggagtttaaaattaggttggttaatatggtgaaattttgtttttataaaaatataaaaaattagacgggcgtggtggtaggagtttataattttagttatttgggaggttgaggtaggagaattttttgaatttaagaggtggaggttgtagtgaattaagattatattattgtattttagtttgggtaatagagtgagattgtgttaaaaaaaaagttatttaatagaaagagataggaatatgtaggtattgtggagagaatagtggttttatatggtgaaagggaagtttataagttttttagtttttgggattttgtgttattataatttatatataggttttagtttatggtttttggtttataatttttattgtttttgttattatttgttgttgtaatgttgggtgttttaagttttagaagtaggttttaataaacggaatttttttgatttttttttgtttttattttatttgtttttttatttttttaaggtaggaatttttgtttatttttttgtttttgatttattttgtttgattataggttataagatttttattttagaaaggatgttttatattttggaggaagaaaggttgtatagagaggttaagaagaatttggataggatttattgggtttttttagtttgtttgttagtattagattatattttttttgtttaattatattttgatatggttgtttatgttttagttatgtttgtttagtgaagtttttataaatgtttaagaggacggggtttagagagtttttggagagttgaatatatggaggtttttggaaggtgttgtatatagggaggattcggaagttttgtgttttttttttttgtgtatttttttatttttagtttttgtaataaattagtaaatgtaagtgtttatttaattgaatttaaagagggggttgtgggaattttaatttgaagttggtgggttagaagtttttaaggttaaatttgtgattaatgtgggtcggggggtagttttggggattgagtttttaatttgtgggatttgatgttatttttaggtagatagtgttagaattggattagaagatatttaattggtgtttgttgtagatttaattgtttgtttgatgtgtagagataaaattttttatatttggttatagaagttttttgtgttaatgattgttgtgagtgagagagtaggaaaaagtatattgagtgttgttttttttatatatagagtattattttttttttgatagttaaataatttaggtttgtatttttttataattataggaagtttagggttttggtttaggaagtggcgttatttttttggttaatattattttttgtttttttttttttttaatatttttttgtgggggtttagtttttttagtttttttttttttttattagttgatattggattaggggttaatatagttttagtggaagtttgaattatgggtaggttagtttagaattttataggggataagtagaattttatattagagatgatatttttaaaataatttttatgtaaggtgttttattttggaaattttttattatttttttgtttaaggaagatattttttttttttattgtgtttagtaatggggtatttttttgattagattttgtttgaattttatgtaattaaaggatatattaaaatgtttttttttatataagaattttagaggggttgggaattagaagagttgtatttttttatttatttatttatttatttattttgagatagaattttgttttgttgtttaggttggagtgtagtggcgtgattttagtttattgtaatttttattttttaggtttaagtaatttttttgttttagttttttgagtagttgggattataggtatttgttattaggtttggttaattttttttatatttttaatatagataggattttattatgttgattaggttggtttcgaatttttgattttaagtgattcgtttattttggttttttaaagtgtagggattataggtatgagttattgtatttagttaaatttttgtatttttttttttaatttattattattattattttgttttgagatggagttttgttttgttgttaggttggagtgtagtggtatgatttcggtttattgtaattttcgtttttcgggtttaagcgatttttttgtattagttttttgagtagttgggattataggtacgcgttgttatgtttagttaatttttgtatttttagtagagatagggttttattatgttggttaggatagtttcgattttttgatttcgtgatttgtttatttcggttttttaaagtgttaggattataggtgttagttatagggttcggtttttatttttatttttatttttgaggtagagttttgtttttgttatttaggttgaagtgtaatggtataattttagtttattgtaattttcgttttttgggtttaagtaatttttttgttttagtttttttagtagttgggtttataggtatgcgttattacgttcggataattttttatttttatttttagtagagacgaggttttattattttgattaggttagtttcgaatttttgattttaggtgatttattttttttagttttttaaagtattggaattataggcgtgagtaattatattcggtttagagttgtatttttgatgatggagagtagtttttttttttttgttaggttatattgtgtgtggttatcgtattttgaatggtgttttagtttttgagatttatagaagttattttttattttttttatttatttgtgtatttttagggaatgtttattttttgaggtaatttgggtgtttttttgttttttgtaatttgtgtgagttgaatatttttatattggtttgtttgtagaaggtagttaggtttttgttttgttttgttttttagttggattagataagagttaatagaaaatgattatagtttaagttatttgtttagtgattaagttgtgaaaaaattgaaattattttatatatgtgtgtgtgtatatatatatgtgtgtgtatatatgtgtatatatatgtgtgtgtatatatatgtgtgtgtgtgtgtttatatatatatatatatatatatatatatatatatttttttttttttttttttttttttgagatagttttattttgtcgtttaggttggagtgtagtggcgtaattttggtttattgtaatttttatttgttgggtttaagcgatttttttgttttagttttttcgagtagttgggattataggtgtttgttattatatttgttaatttttatatttttagtagagatagggttttattatattggttaggtaagtttgtaatttttggttttaggtgattcgttcggtagttttttaaagtgttgggattataggtatgagttattatatttattttgaaattatttttgatttggaagttattttttttttgtgtttttgaatatatggtaattttttatttatttgtttagtatttttatgttttattggttttttttaaatttgttttttttttttgcgttttttttatttttgtcgttttatttttagtatacgttttttttttttttttttttttatttaattatttaatagatacgtgatgagagtttacgtgtgttaagtattgtgttggtaatagaatagacggagggtaagacggagtttttttttagttacgggtttttatagtttagtatgatgtttgtagttatagttaagtatattgtttatatttgagtttagtagatttgggtagtgaagtggagtaaagttagtttttagatggaaaagtaaatagaaatatagattgttatgagttttttttgcggaggttataaatttagacgttttgagtttggaatttgatgttatatagatttaaattttattatttattaattgtgtgaatttatttttgggtttttttttttttttggaagtaattattttagttaattaataggttaagatgaaatgatttattttgtataaagtatttagcgtagtatttgatgcgtggtggtaggaaataattattaaatggtagttggtattaatgatatggatttgcgttaggagttatatgagtagagtaagataggttttaatttttgtattttatttttttttttttttgtttatttttttattttttgattttagttttttttagttagaaaggtagaaatttttaatggaaattaagagtaggggaggggtggaaataggaaatatgggttattaataaaaattgggttttaggataggcgtcgtggtttacgtttgtaattttaatacgttgggaggttgttggatagattatttgaggttaagagttcgagattagtttggttaatatggtgaaatttcgtttttattaaaaataaaaattagttgggtgtggtggcgggcgtttgtaattttagttatttaggaggttgaggtaggagaattatttgaatttaagagatagaggttgtagtgagtcgagattatattattgtattttagtttaggcgatatagtaagatttcgttttaaggaaaaaataaaaatataaaaaattgggtttttgagtgttttatacgcgtgagtggttattttgtttttgagaagtagttttttaattttttggtttaagtagagttgggtttttttggacgtttataggatttattttagtttgaattattttttggataggtttttaatgtatttttttttaagttttaaaggttataattttttgaatggttggaaaaatattgtgttgaaattataaagaatttaggaaagaaaaataggtagtaaaatggaattaaatatagggagttgaatagacgtttattttgatttatgtttagttttggttaagaaaataataaaatgtttaggaaaaattaagttgaagggagggagtgggagagaggagttagtaatattaaatttgagattttatatgaaaaaagataaaagttggtttatttattatagtatatatataaaaagataaattttatatgagattttaaaaaataaaaattatataatattaaagggaaataaatttttttatagtttgggagtggaaaagatttgtataattatggttaaatttttagttgtaattgaagagaaagagtgataaattttggttgggtatggtggtttatgtttgtaattttagtattttgggaggttaagggaggtggattatgaggtcgggagtttaagattagtttggttaatatggtgaaatttcgtttttattaaaaatgtaaaaattagttaagtatggtggcgtttatttgtagttttagttatttaggaggttgaggtaggagaatcgtaaaaaaataaaaaataaaataaaaataaaaataaaaaataaaataaacgaaataaaataattattttaaggtagtatattatatttattagatcggtaaaaaatttaaaaatttgttaatatatgtagttggtaaagttatagggaaataggtattttagtatattgtgattaggaatgtaaaatgaggtaatttttatggaagggaatttgattggttgtatttagtaaaattatatatgtatttttagtaatatagtttttaggaaattattttaaaatattattggtaaaaatatgaaaaagtatttgtgtaggttatttattgtagttttgtttgttataataaaagattagaaataggtcgagtatggtggttgtaattttagtattttttgagaggttaaggcgggttgtttgtttaagtttaggagtttaaggttagtttgagtaatatggtgaaattttatttttattttaaattttaaaaataaataaataaataaatattggaaataatttaaatgtttaataataagggattgattaaattaaatatgaagtattatggagtattaaaaaaagaataaatatttttatatattgttatgggttgattgatagtatttattgttaagtaaagaaaggttaaattgtatgttaattttattttaatgtttatttaaaaaaaagagaagtggggaaatttggatgttattttatatttaagaatatatatatgtatatatttaaatttttaaaaattaaaagtaaaaataaaagattattcgtatagtgagttagtgatataattatagagagaaaaattgttttaaataattttagattattgtaatttgattgtatatttttagtgagatatattttaaggataaaaaaaaaggaattgaaagaatagttttattgtggagataaaagtggttttattttggatgttaatttattatgtcgttatttgattagttttagttttaggaacgttttttgatttttattttatttattgtttttagtgtaagaatatattaattttgatgttattatataaattataggttgtgacgtatatagtattttagtttgttttggatagttgtttttgttttgtattaagtatatatattttttttttatggtatataaataagttttgggtttgagataatagtgtgagatttatttgttttgtagttgtttaagagtaggttttcgtttgtaagttttttagtgaaatacgttttagtaataaattggatttgtttattttgttttttggttttttagtttttttgatttttgggggttattttgtatgtatggtttttttatggaaaagtattattatattaatggcgataatattgatgttgttattttaagattgtgtataagtattgagggataaagtaaacgttggtggatttggaaattagaatatttggttgggagaaaaaaatagatgtaagtatgtgaagttatataaaaatattgagagtttttatttgaatggaaagtatttttttttttgattttagagttggtaaaaaaaattttaaaaaaataaagaaagtattagtataaatagataatgagtttatttttaaaatatgtttatattttttttttattaaaaggttttagaaataagaattaatttagtagtaataagtatttttggtagtttattatttttttttaattgaaattagatttttttaaagaaatgtttggtttttagattgggaacggaaatgtataagatgtgtttcgatatttggttaaattagaaatttaaaaagttattaaagtttttttggattgtgttagaaagaggtgaaaagatttttatttgttaaagacgggataatttgagtatttataagattaattattataatggattatagtgaattgaagtatattaaatatgttttaatttatgattttataatggtattttaaataattggttatttgtggaggattttacgtaattaatttaataatttgaaaattggtaataaagagaaattttttattttgttttttttatagaaattataattgaattttatggttgatgaagtaattttttttatataagtagtttatttaataattgaagaaaggagcgagtagggtaggagagtgggtgtgggggagaaaaaagaataaatatataaatgaagaaagaaataatagaattttaatattattattttgtaatttttaatgaaataatggattagtcgatgattacgaatgatttagaatattattaaaagagacggatataagtagatagtatgtatttttgggtgaatgtttataatattttttgagaaggggttttgtaaaaataaatattgaattttaatttgattagatttttagatgaaattagtaatttataagaagttagcgattagaggagtgttttatatagtatttttagggtagaattagtaaaatttagattggaaagttgtatagtataaaaaaaatttattttttttaataaatttattttaagagggggaaaaaatgagagagttaatttgtatattaaaggagatataaaaaataataattaggttaggtaaggtatatttgtaattttagtattttgttagattaaggtaggtagatcgttttaattaaggagttcgaaattagtttgggtaatgtggtataaaatttgtttttattaaaaaaaaaaaaaaaaaaaaaaattagtcgggtgtggtggtttatgtttaaattttatttttgggattataaattataattttaaattttgtattttgaaattatatttttgggattataggtgtgagttatcgtgtttggttttcgattttgatttaaagtaaatttattacgaaataaaatatatgaggtagggtacggtggtttatatttgtaattttagtattttgggaggttgaggtaggtagattgtttgattttaggaggttaagattagtttgggtaagataggaagatttttattaaaattataaaaattagttaggtgtggtggtatgtatttgtagttttagttatttaggaggttgaggtgggaggattatttgagttcgggaggtagaggttgtagtgagttgagattatattattgtattttagtttgggagaatttgaaaaaaattagagatttttaaattttaagttattttgttattgttttgagtttaggaatttgttgtttttagtaaagattattttagagtttagaattatagggttggattatttttttttaattgtttttttattgattatgattattttttttatttttttttagtttttttttttattagtatagaggagagaattaggagagtggaggatttagttatttagaatgatgtgtaggcggggcgtggtattttacgtttataattttagtattttgggaggttaaggtgggtagattatttgaggttaggagtttaagattagtttggttaatatggtaaaatttcgtttttattaaaaatataaaaattagttaggcgtggtggtacgtgtttgtagttttagttatttgggaggttgaggtaggaaaattattagaattaggaaggtagaagttgtagtgagttgagatagtattattgtattttagtttgggtaatagagtgagattttattttaaaaataataaataaataaataaataaataaataaataaataaataaataaaaatagaatgaggtgtagataagaggttttttgaaagtggttttaatttatatttttatttatttggagtatagattttggtattattggggatgtttttaaatgaataagttttgtttatgtgatatgagttgatgtttttgattttaattgggtttgtgatttggaaagagaagtgtttaggatatttttttaaatattattagtagttagaataattgtaaatgatgtattgtgggattttattttgaaaaaagggatattttgtgtttacgatttagatgtttttaagttagaagaattaagaattagttaatatttttatttatgtttattatagttttttaaattatttaattttttttagatttagttgttatttttgtaataagggataatattttatttagattaggaattagattaggatattttttgaggtttttaattgttttgagttttaattttattagttataatattgggaggaattttttattttagagaatagaataaatagtaggatttaaggaagggtaagaatgggtaagttaggaagtgttgttggatatatgaagttaagggttgaatttggtaggtagatattaattaaataaatgtaatatttattgagtttttattatatgtttgttgttaggttaggttttttttatgttttattttattattatttttaataatttgtaggtaataatttttattttttttttttaaaggaaattttatttcgatattttaggaatatgttttttacgtatttcgtattttaaatatttggaagttatatgaaataattgaaaagttttatgtaatgtgtagtaaagatgttgagggatagtttaggtttaatgtggaaggtttgagtttatggggtgggaggaggtgggggttaaagatttttataatataatgaataaagttttttttattttatttttaagtagtagtttatttaaaagaatttgttatttttgtaaaagatatttagaagattttaagtttttttagttagagttttgtgtttgatagaagttatgattagttattgttttatttttagtggtttatttggttatttgttattttgggtttttttgtttgtttgtttgtttttagaaattttagtaagtaatatatgaattatatttttaaataaaggtttgttttattttttataattttataataaatgagtgaggttgaaagtggggtgtatttatttgtaagaagttataatgtaaggggtgattatagagtaattgttttttttttattattttttaataagagttatattttgaagttttaataattatatattgatagtgatatataaaaaagaggaatttatatgggaagtaaagatgtgaattatattacgtggattttttttttaagatggggttttattttgttatttatggtggagtgtagtggtataaatatggtttatggtagttttgatatttttaagtttaggtgatttttttattttagttttttaaattaaattaattttttgttttttatttttagtagagatagggttttgttattttgtttaggttagttttaaatttttggatttaagtaatttgtttgttttggttttttaaagtgttaggattataggcgtgagttatatatggatttttttgtttttagtgaaggagtaatatttgaattgtgtttatattagtttagttaaaataaaaataaaaaaaatttttttttttattaaattatataattaataatggggtttaattttgtagttataattatatttagtattattttagtgaattaatgaagtaataatggggtatagggttttattagttgtttgtgttttttggttatggagatttagtacgataaatatgtttatttgaaaatttagtatttttggttgttttatttgtttgtgaagatttttgatatttagggatatgtagttttgttgaggtttagatataagtggtattgtttagttgggtatggttgagtgagtatggatgagagttgattatttagttttttaaagcggttttgtattttttagtaggtggttttataggtagaaatttacgggaaatattttttttaaaaaattttgtttttttgtgaaaatcgttttttaataaagttatttgtttatataggtaatagaagtaatgaaaatgtttggttaggtgtggtggtttacgtttgtaattttagtattttgggaggttaaggttaggagtttgagattagtttgttaaatatggtgaaattttgtttttattaaaaatataaaaattagtcgggtatggtggcgggcgtttgtaattttagttatttaggagattgaggtaggaagaattatttgaatttgggaggcggaggttgtagtgagtcgagatcgtattattatattttagtttgggtaataagagtaaaatttagttttaaaaaataaaaaataaaaaataaaaaaaaaaagaagtaatgaaaatgtgaagagatttaagaaagtgatagtttttaggaattgtaaattggggtaaagattggaatttttattttaatgatagtttagttttatgattttagtataaatgtagatatttcgtaaaagattagagaaatgattttaggaaatgtgtttagttagtttaaatattttttatagagtacgatataaagtttaagtgaaagtaggaatagtagataatttgtggtaagagaatataaataggaagtagtagtttttcgaagtaaatattattgaattaggtttagaagatttggggaagtatttatgtattatttaattggaagatttataaagttttttagtgtttttggtagaggttaagaaagggtcggtttttttttttgtaagtaggtcggtgggattattgtatagtagtttttttttttttttaggattttttatttaattttatattaatggattttgggggttgaaagattttgggttgggtacggtggttgatgtttgtaattttagtattttgggaggttgaggtaggaggattatttgagtttaagagtttaagattagtttgggtaatatggtaagattttgtttttataaaaatttttttaaaaaattagttaggtatggtggtgtgagtttgtggttttaattatttaggaggttgaagtgagaggattgtttgagtttgggaggttaaggttgtagtgagttaagatcgtattattatattatagtttgggtgatagagtgagattttttttaaataataaataaagattttggggtcgggcgtagtggtttacgtttgtaattttagtattttgggaggtcgaggtggatagtttacgaggttaggagttcgagattagtttggttaatatggtgaaattttatttttattaaaaatataaaaattagttgggtttggtggtacgtgtttgtaattttagttatttaggaggttgaggtaggagaatcgtttgaatttgggaggtaaaggttgtagtgagttgagattatgttattgtattttagttagggtgatagagtgagattttattttaaaaaataaataaataaataaaaaataaaggttttgaattttttagaataagattgttttgtggttaagatgagatgtgggggtggggttgtaaaagtagttagtatgtcgagtatagagtttttttttaataggaaagtttttagatttattttttaagattttattttttttttgtatagatattatttagtgttgtatgtatatttttttttttatttttatttgatttattattttatttttgtttaatgatatttggatttatatgtttttttttgtaattattaaagtttttttggatataaatttggtgtatataaataataatagtggggtcgggtacggtggttcgcgtttgtaattttagtattttgggaggtcgaggtaggcggattacgaggttaggagatcgagattattttggttaatatagtgaaatttcgtttttattaaaaatataaaaaattagtcgggcgtggttgcgggcgtttgtagttttagttgtttaggaggtcgaggtaggagaatggtgtgaatttaagaggtagagtttgtagtgagttaagatagcgttattgtattttagtttgggcgatagagcgagagttcgttttaaaaaataataataataattttttaaaaaataataatagtagttattaagtattgattgtaatatgttaaataacgtatatatattgttttttatttttatgatgtttggaaatagaatttataagaaatagaggtataggaaagggaggtaatttatttatttttttatagttagtaagtggtgggtttagggtttaaatttaagtaggaaggaatttatgtcggatttatgttgttagtaagttgtttttaatggtgtgtatattattcgtattttttttttatttattattagttacgtagttttataaaagttgttttttaagttgagttaaaggaaggttaattataaatatatttgcgtgtacgtatatattttttatttagttagattattttatttttttaattaaaggaattgggttttttttatgttagatattggtatggtaaatatgttagttatggtttttgtatttttggagtttttatttttattatcgttattttttaggtatgttttaaacgatattttttttagtaggtattttttgttattttagattaaattagatgattttattatatagtattatgttttttttttataatatttaatattttgtaattatttgtttaatgtttttttttttgggtcgggttcgatggtttatgtttgtaatttttgtattttgggaggtcgaggtgggtggattatttgaggttaggagttcgagattagtttggttaatatgatgaaatttttgtttttattaaaaatataaaaaattagttaggagtggtggtaggtgtttgtaattttagttatttaagaggtttgaggtaggataattgtttgaatttgggaggcggaggttgtagtgagtcgagattatattattgtattttagtttcggtaataagagtaaaatttcgttttaaaaaaataaaaataaaaaagtttttttttttattgttttgtgatttttatgaggatgagacgggttgttttgttcgttgttatagttagtattttgtgtagtatttggtatttaagagaaaatttataattgtttgttgaatgaatggatgtgaataagtagtaggaaaagatttttttaaaggttagggaagatggtgtagggttggtgattaatttatatttagttgatattagtttttgtgttattaagttttaatttttttttgtttaataggaattagtagtttttgagtttaagtttttttttattgtatatatattttagtgtttgttttgttaatgagttttgttaggtttagtttaggagttgtattagtgagtggtagtttgttttgtggaagggattaattaattttaaatgttatattggttttatagtttttgttttttatacgtatatttaatttgggtatttttttaattataatttttagttttggattgaattttaagagaattaataatatttggaacgaatgattatattttcgttttattttttattgtgttggggttatttggagatggtgttttttttattgtagtttgtaggaggaggttatatatttgggaataagagtggtttttgaaagagatggttatttaggtattaggtaggtataggtgaggtgggttattagatagggatttggaatttagaagggagttttttataggaggggtgggaatttttatgcgtttttaattttttttatttagatttagggagttgttatgggagggagttaggaaggggtaatttttgtagttgtttttaatgattttgattttggttatttgttgtttagttttttattttttttttttttagtttttggtttttagggaggttttgttttaataagattgttttaggtgtgtgtagtgttgatggttttagttgtatttgtttatagatataaagggatagaaaaatttttggggatagggtagggttgtaacgtttagtttcgttttttagggagatgtttttattataaaagatgtattatttattttgttataggaggttgttgtttttttgtagtatttttttggttgtttttgagatggggttttattttgttgtttaagttggagtatagtggtatgattatggtttattgtagttttaaatttttggggtaatttttttattttagttttttaagtagttggtattataggtgtttattaatatatttggttaatttttatattttttgtagagatgggggtatattatgtggtttaggttggttttaaatttttaggtttaagtaatttgtttgttttagttttttatagtgttgggattataggtatgggttatcgagtttagttttttggtagtatttatataagttgcggaaggtttttgattttaggttttagatggagtgttttaaagtggtatgagatttagttttgtagatttttgttttggggtttagagttgttttgttttttatagattttagtttggaataattttatttttattaaaaaaatataaaaattagttaggtgtgttggtgagtatttgtagttttagttatttggtagattgagatgggaggattgtttttgttttaggagtttggggattttgttagaggaaggttattatttgttaggtaaagggatttttattgtaattttagggttaggaattcggtttataaattgttttttattttaagattttaggtttaaagttaaagttttttttttttgtgttgtgtagtattatttttattatatttttattaatttagggtatttttttagtttttttatgaattagatttttttttttttgatttgaaagaaaaggattttaataataagttagaattttttttagtaaaatttttgggattaataatattggtatttattttgtttatgtgtgaataattaatattttttagttttttttttgttttttttgtgtatatatttttttatagatattatcggtttttttttagtttgtagttgaaattttgtgattgttgggggtaggttttgttttttttagtttttattttggattttaaggttagtgttttgggtcgggcgcggtgatttatatttgtaattttagtattttgggaggtcgagtttggtggattatttgaggttaggagtttaagattagtttggttaatattgcgaaattttgtttttattaaaaatacgaaaattgttaggtatggtggtacgtgtttgtaattttagttatttgggtaggagaattgtttaaatttgggaggtagaggttgtattgagttaagattacgttatagtattttagtttgagcgatagagtgagattttgttttaaaaaaaaaaaaaaaaaaaagaaagatagtgatgtgttagtaaattagtttgtgggggagatggggatttttgatttgtagtagttattcgtgtgtagttatttcgtggtgtagatatttttttttatgattaatttttaattattgatagtttaataattagtttgtaaattttttgaatatttaatatttttattagtaggtttgagttggttttagtatattattggtttaggggaattattggagtttatttgggatttaggatgttttgataaaatgagtaatagattatatggaagtgaagagagagagggtattttatacgttatttttgttcgttggtttttttggtttagggtattggaaagagtacgggttttagaaaagttttaggtttaagtttttgtgtgattgtaagttttagtatttaattttgtaaaataggattgataaaattaatttataggattattttgaagataaaattagatatttagattaaatgtttaataaatatatggagtaagtttttaatatacgtttttttttgtttttattttgttttaattttttagtagtttaaagaatttttttttaaaggatttaataggagaagtttaaatgtattattgttaaagaggggataggtaagtttatttaatttattttagtgtgagttttaattttggatttttttaaggagtatagtttttttttgttttaagatttttttttgtttttattttaagaggtgagtttattaaaattttttggggtttatgttatttagttttatttttttttgatatggtaagttgtatttagaattagaaattatattttaaaaagggagtagtatgttagggttagagtaagggtatcggttgttttaaggttgttttttgtacggggtagagtatataaagtttttcgtaagttttaaatgttttttatattaaattaggttttatagttaatggttatattgaatatttatggggatttatggtataattttgtagtaggaggttgtggttcgagatttagaagaattttttaattataaaattattttagaaggaagtggaatttttgattttgtggttcgagtgagggaggagttagaagtagaagggatatgaggttttttagatttgagttttgttgtttataaataatgaaatgattgggattatatagtagagatagtaaatgaaattttggagaaatatcgtttttttttattttttatttttatttttatttttattttattttattttattttattttatttttttgagacggagttttatttttttgtttaggttggagtgaagtggtatgatttcggtttattgtaatttttgttttcgggtttaagcgattttttgttttagtttttttagtagttgggattataggtgtttgttattacgttcggttaatttttgtatttttagtagagatagggttttattatgtggttaggttggtttcgaatttttgattttaggtattttatttattttagttttttaaagtgttaggattataggcgtgagtattatttttagtttaagaaatatggttttttgtgataaagagtttttggtaatttaggaaatttttagaaattttgaagtattatataaaaatttttaattagaattagatgagaaggttaggtgtagtggtttatgtttgtaattttaacgttttgggaggtcgaggtaggcggattatgaggttaagatatcgagattattttggttaatatggtgaaattttgtttttattaaaaatataaaagttagttgggcgtggtggtgcgcgtttgtagttttagttatttaggaggttgaggtaggagaatcgttttaatttgggaggtggaggttgtagtgagtcgagattatgttattgtattttagtttgacgataagattttattttaaaaaaaaaaaaaagaattagatgagaagatttgggtttgagttatatttggttattttttaattgattgatttatgtaagttatttaattatattgagttttagttatttatatgtttatttatttaggttatatttattgagtatgtagtatgtgttttgtatggggttaagagaattttgggaagataatggtgagtaaaatcgggtatagttttttttttttttttttttttttttttttaagtagagacggggttttattttaatgtttaggttggtttcgaattttagggtttaagtgatgtttttattttggttttttaaagtgttgggattataggtataagtaattttgttaggtttatggttttttttttacgaagttgaaaatttattttttcgtaataaggtatattaatgttgagattattggatatgtatatgtaaaagaatgaagttggatttttattttatattatagataaaaatttatttaaaatagattaaagatttatatggaagagataaaattattaaatttttagaagaaaagatagatgtaaatttttgtgattatagattaggtagtggttttttagttatgatatagtgtataagtaggaaaaaaaaatagataaattggattttaaaatttaaaatttttgtgttttaaaggatattaagaaaataggttgggtatggtggtttatgtttgtagtttaagtattttgggaggttaagttaggaggattgtttgagtttaagagttcgagattagtttaggtaataaagcgagattttgtcgttattaaaaaaaaaaaaaaaaagaaaagaaagaaagaaagaaataggtaaaaaagatttatagaatgggataaaatatttgtaaattatgtattagttaagagatttatatttagaatttataataaatttttataatttaataataaaaagataatttaattaaaaaatacgtaaaggatttgaataaatatttttttaaaggtatataaatgattaataagtatatgagaagacgtttaggttaggcgcggtgatttagtattttgggaggtcgaggtgggcggattatttgaggttaggagtttgagattagtttggttaatatgttgaaattttatttttagtaaaaatataaaaaaatagttaggagtggtggtgtatatttgtagttttagttatttaggaaattgaggtaggagaatcgtttgaatttaggaggtagaagttgtagtgagttgagatcgtgttattgtattttagtttgggcgatagagcgagattttattttaaaaaaaaaaaaaaaaagatatttaatattattaattattaagaaaatgtaaatttaaattattatgaaatattattttatatttattaagatggttagaattaaaaagatagattggagaaattggaatttttatatattgttggtgagaatgttaaatggtttagtaatattggaaagtagtttttaaaagtggaatataaagttaatgatttcgaaattttatttttaagtgtatattaaagagaaaatggatgtttatataaaattttatatatgaatgtttatattagtattatttataatagttaaaatttggaaatagtataaatgtttattaattgatgaatgtataaataaaatatggtatatttatataatgaaatagtatttaataataaaaagaaagtattgatttatgttataatattgaaaatattatgttaagtgaaagaagttagatataaaatgttatatattgtatgattgtttatatgaaatgtttagtgtaggtaaatttatagagataaaaagtagattagtggttgtttaaggttgggaaggggagagattgggggtaaaatcggaaatgattgttaatgagtatgggacgtttttgagtgtgatgaaaatgttttaaaattgtggtgatggttgtataattttgtgaatatattaaaaattatttttgtcgggtgcggcggtttacgtttgtaattttagtattttgggaggtcgaggtgggtggattacgtggttaggagtttaagattagtttggttaagatggtgaaattttatttttattaaaaatataaaaattagtcgggtacggtggtaggagtttataattttagttattttggtttgagtaggagtgtcgtttgaattagggcggtagaggtagtagtgagttaagattgagttattgtattttaatttgggtaatagagtgagattttgttttaaaaaaaaaaaaaaaaaaaatatattttattgtatatttttaaagggtggattttttttttttttgagatggcgttttattttgtattttttaggttggagtgtaggagtatgatttcggtttattatattgtaatttttattttttataaggtgaattatatagtatgtgaattgtattttaatataaatgttattaaattgtatatttatatttatagtagtattatttataatagttaaaaggtggaagttatttaagtgtttattaatagatgaatgaataagtaaaatgtggttaggtttggtagtttatatttgtaatttaagtattttgggaggttgaggtgggaggattgtttgaatttaggagttcgagattagtttgggtaatttgatgagattttatttttattaaaaatataaaaattagttaggtatggtggtgtatatttgtagttttagttatttaggggattaaggtggtgagaggttgatttgagttagggagattgaggttgtagtgggttgagatcgtattattgtattttagtttgggtaatagaaggagattttgtttttatttaaaaaaaaaaaaaaaattgtataatatatatatatatataatggaatatttttttaaaaagaaaattttgatatgtattataatgtggataaattttgaagatattttgttaagtgaaataaaagttaattatgatcgggcgtggtgttttatgtttgtaattttagtattttgggaggttgaggcgggtggattatttgaggttaggagtttgagattagtttgattaatatggagaaattttgtttttattaaaaatataaaaaattagtttagtgtgttggtgtatgtttataattttagttattcgggaggttgaggtaggagaatagtttgaatttgggaggtaaaggttgcggtgagttaagattgtgttattgtattttagtttgggtaataagaataaaagtttattttaaaaaaaaaaaaaagttaattataagaggaaaaatattttatgattttatttttttttttttttttagatagagttttgttttgttatttaggttggagcgatttcggtttattataaattcgttttttgggtttaagcgatttttttgttttagttttttaagtagttgggattataggcgtttattattacgtttagttaatttttgtattttaagtagagacggggtttcgtaatgttggttaggttggttttgaatttttgattttaggtgattcgtttatttcggttttttaaagtgttgggattatattcgtgagttattatgtttggtcgattttattttttttaagatagaattttgttggagtgtagtagcgtgagtttagtttattgtaatttttgtttttcgcgtttaggtaatttttgtgttttagttttttaagtagttgggattataggtatacggtagtatgtttagttaatttttgtatttttagtagagatggggttttgttatgttggataggttggtttcgaatttttgattttaagtgatttattagatttggttttttaaagtgttgggattatacgtgtgagttatcgcgtttagtttattattttatttataaaaggtatttatattttggttaatatggtgaaatttcgtttttattaaaaatataaaaattagttgggcgtggtggcgtgtttttgtaattttagttattcgggaagttggggtaggagaattattagaatttaggaggtagaggttgtagtgagttaggatcgtgttatagtattttggtttggtgatagagaaagatttcgttttaaaaaaataaataaataaaaaataaaataaaaggtatttaaagtggttatattttatagaaagtagaatggtggttgttagggttaaggaaagtggggaatgtgaaggtattgtttgttgggtggagttttagtgggggaagatgaaaaagttttgaatgtggttgatggtgatggttgtataataatgtggatgtatttaatgttattgaattgtatgtttataaatagttaaaatgttaaattttatgtttattttattataatttttaaaataaaggtataatgatagtttttattttatagggtgattgtaagaatgaataagatgaatattggttgaaggaatggttaaaatgagtaataatttttatgagtttggtttggagagtagggttgggaatgagatagggagtggtggagggataatttaattgtttattttaatatatgtattattgtttaggtttttttttaattgttatataatttaataaagtataatatggtagagggttgtttatatttttaagttattgatttgtttaagttttagtgtttatagaaaagtgtatgagttttgggattaatattttatttttggttagtatttgattttttgtgtttgtatttttatgtgtatttttttttagatttttttagttttgtttattttattttttatttatttttaattgatttgagttttagttataaagatttttaatttttttgtttgattattagattttttttttttatttgagaaaggttttagatttagatagaagggttttttgtttttttgatttagtatgttttttttttatttttatttgattttatatagtgaaattttttttgagagttgattttttagttttttattttgcgaattgtaagatttatttatttaggaggtcgaagatggtttagagtttagatagtcggaagtttgttttttgggtcggggaatgttggtagaaatttagatagttgacgttatttggtttagatggcggaagttattgtttaattataggaaatcgatgttaataatatatttttttatgattgttttttttaatttagaaaagtatttttatagagaggaggtagtttaatagtagtggaaagtggtttagttttcgaattatgtgatgtgttgagtatgaggttggttgtagcgttagttgatagataacgtgagagcggagtattgtattttaagttagaaaacgtaagtttgagtaggagagcggttatttaatttttgatttttgataaattattggattttttttaattggtttttttaaagttatgaataataatattttatagaagttattattgtaaggttggaatgaggttatttgtatagaagattttataagtttgaagtaggatgttaatgtaaaattttgtttttgtgagaggttttttgggagaagtagattttgaggggtagaatggagagtgattataggttgattttagagttaggtagttggcgttgtgtgaaagtgggtttgtcgttgtttagttttgtaattgggatgtataatagtttttttgtgtttagttatttagttaaaatgaggataagaatgtttatgtttggtcgggtgtggtggtttacgtttgtaattttaggattttgggaggttgaggtaggtggattattaggttaagagattgagattattttggttaacgtggtgaaaattcgtttttattaaaaatataaaaattaattgggcgtggtggtacgtatttgtagttttagttatttaggaggttgaggtagaagaatcgtttgaattcgtaaggcggaggttgtagtgagttaagattatatttttgtattttagtttggtgatagagtaagattttattttaaaaaaaaaagaatgtttatgttataggatggttttgggggatagggggatagtaagtgagttattttatatagagtatatagtataatgtttagtatgtgatagtatttattgttgagtaataattaaaaaataaattaggttggtgggattaggggaaagtaaagaaatgaggtaaatggtttaagatatatggtttttttgtttagataatgtatataatttaaaaatttttgtttattattaaatattttaatttattaaatattttggttgataaaaaaaaaaaaaaaaaaatgtaagttatttttttgttattttggtataattagtattgtatataatattttatagtttaagagttattttataaaatttttaataagtttttgtttttttgtagttagttttttttttgttggtttgttcgttgtttttttgtttattgtttttttgtttttttattttttttaataaatttgtttttttttatttataattgttttggtaaatttttttatttttgagtcgttagtttagatagtcgttgtttttttgaaatattttggtggtttatatagggaattttttttttttatatagggattttttttttttttttttttttaattcgggattttcgaaggatagtatttaagtataaagataattgtaggtttttggttagagttatattttagtgagattgaaaggtgtttgtttatgtggaagtatttgattattattgtttggtttgggtgagtgatttgattttttttttttttttagttttttagtaattagtttttagtatttttttggtaattaaaggtaattggttagggttattttttagtgttgtttgaaggtttagagtgaatagggttagttgttttgtttggaagggagaaaggttgttgtttattttttttaattgtaagttttttatttttatatgtgatataattgatagtagaagtttgttcggggtaaatttatatacgttttaggtaatttagacgtttttttttttattttaaatttatttatggagttagttagttattttgttttgggttttgttaaattaggtgatgttagatagttttagaacggtgagtttttttttatttattttattttttgggttaagattaggtagagatttttttttattttttttttttttcgtgtttgggttgattatttagtataagtgagtgtttggattggttatttagtatgaggtttttgagcggttaggaggttttttttaattggtgggatgttttttttggaaagtgtatttaagtttttttgtggatgtaagtggaattttttgtttattttagtgagatgtttttcgtagaaaagtgtagtttatgtttttgattgatattgttttagagcggtatgttttttagttttattatggagtaaatttcgttcgtttttgtaaatttgtttttaggttgtaaagaattgtgataaattttatcgttaaatttttaaaaagaaatatttaatttttttgtataatatagtatgatttttatgtagaaaattattaaattagtttttttagtttttataattaagaataaaataaggaggataagattaagaaaaaaataaatacggagttaaaaggtaggtttaattgttggttgttttataagttttagtttttatttagatagtagaatttataaattttttgtttattattaaatattttaattttttagatattttagttgataaaaaaatgtaagttatttttttgtaattttggcgtttttttaattattgtaataaatttgtttttttttatttataattgttttggtaaattttttttttttttttttgagatggagttttattttgttatttaggttggagtgtcgtggcgtaatttcggtttattgtaagtttcgttttttaggtttaagtaatttttttgttttagtttttcgagtagttgagattagattataagtatttattatcgcgttcggttaatttttgtatttttagtagagatagagttttattatgttggttaggttggttttaaatttttgattttaggtgatttattcgtttcggttttttaaagtgttgggattatgggcgtgagttattacgttcggttggtaaatttttttattttaacgttattatcgtagatagttattatttttttgagatattgatgaagtagcggttaggatgatttttttagaggttattttgtttatttgtaggttttgggttgggtgggtatttagtttaatttttagagattttatgtaaagaaatgttgttttaatatattgtttatatggtaggtagagtaatttagttaaaaatttgattatgttatttttttatataatagtttaaatattttcgagtttatttatttaaagattaatattttaatatttgagtttttgtgataggattttgaatttttttttagttttattttttgttgtttatagttttttattaagggtttagtaattttagattatttgtagttatttggtttttattgtttttttgtttatcgtggtttttttttttttttagaaattttgttattgttaatttttagttattttttaagatatttaggtttaaattttttagaaagtttttttgtagggtttgtttttttttttttttttttaattttttttggtatttttattattgtataagttagattgaattttaattgtttttgtgtttgttttatattagtttaggggttttttgaaggtagaggttagtattaggttttggttgtttttgtaaagttagtttaagtataatgttaggtatagagtaggcgtttagtaaatcgagtggaaagattgataaatgtatatttagaagttttatttgttaaagtttgtttgtttatttgttttaagggaaaatgttgtttgtttggggttggggttaataattttaagaaatatagtttttttttgttttagtggtttttttttttgtttttttttgtttttttgagaattatttttgtttatgttttagatattttttatatttgtttttttgttttgttttgttttgtttttttttatttttatttatttatttattttttattttttgagatagaattttattttgtggtttaggttggagtgtagtggcgtatttttattttattgtaatttttgttttttagttttaagcgatttttatgttttagttatttaagtagttgggattataggtttgtattattaaggttaattaatttttgtatttttagtagagacggggttttagtatgttggttaggttggttttgtatttttgattttaggtgatttatttgattgggttttttaaattgttgggattataggcgtgagttattttgtttggttttttgtattttttttttttttgtttttatattttgtttcgttttttttattattttgttttttttttttttttttgtattatatttttgtatttttgttgttttatattttttttttttttttttttttttgtggttgagtggttttttgttttattgttttttagttagggttagaagttggtaagaatatttttgggggttaggtgcggtggtttatgtttgtaatttagtattttggtaggttaaggtagggggattatttgagtttagtagtttaagattagtttgggtaatatagtgggattttgtttttgtaaaaaataaaaaaattagttgggtatggtagggtatgtttgtaattttagttattcggaaggttgaggtgggagaggattatttaagattaggaggggaagtttgtagtgagttatgattacgttattgtacgttagtttgggtaatagagtaagattttgttttaaaaaaaaaagtatttttgggtttatgatttttagaaagaaaaaaggagagtttgaaaggaagaaaattagttttattatgtattaagaagttttaaatattttattttatataattttagtaataaatgtgtaatgtggtatattaattaagtaggttaggttatgttttagtaataaataatttttaaattttaatggtttttatgtagtaaagttttattgatttttttgttatatatttatggtgggttggtcgaggttttgttttgagttgttattgttttaattttaggatttaggttgatagagtagttattatgtggaatattattaattattatagttgaaggagaaaaaaaaatgtggaaaagtatatattagtttttaaaatttttatttagaaggtattattttaattggttttagtaagttacgtagttacgtttggattagtgggtaggagttaaatggagtggtaaagtttaatttttttatattttttgaaggaaagagggttttaagtatttaaaaataggtttgataattatagtggatgttattgtttttattttattgatgaaatagttgaggtttaagaagtttatatagtttgtttaagaatatgtagtaaatattagagagaggaagtgaatttatgttttttgatttttaggattgtgatttttttttttattgggtttttaagatgttaggtttggttaggtatagtggtttatgtttgtaatattagtattttaggaggttgaggtgggcggattatttgaggttaggagttcgagattagtttggttaatatggttaaattttatttttattaaaattataaaaaattagttggcgaggtggtgtgtgtttgtaattttagttatttgggagattgaggtcggagaattatttgaatttaggaggtagaggttgtagtgagttgagatggtgttattgtattttagtttcggtaatagattaagattttgttttaaaaaaaaaaaaaaaaaaaggtcgagtacggtgttttacgtttgtaattttagtattttgggaggttaaggcgggaggattacgagattaggagatcgagattattttggttaatatagtgaaatttcgtttttattaaaaaatataaaaaaaattagtcgggcgcggtggtagacgtttgtagttttagttattagggaggttgaggtaggagaatggcgggaatacgggaggcggagtttgtagtgaatcgagatcgcgttattgtattttagtttgggcgatagagttagattttgtttgaaaaaaaaaaaaaaaaattaggttttttttattaattttttggatattgttgtgaggtttggtttgttggaatttaggaagaaaaaggataagaagtttatttttgtttattggttttagagtatgatttttggtgaggggtattagaatttttttttaaaatattgagagatttttaatttttaagataaaattaggtgggttataaaatttgtattataattgttagaaattttttagataaaattaatttatggtaatagaagttagaataggttaggcgtagtgtttacgtttgtaattttaatattttgggaggttaaggagagtagattatttaggttaggagtttttgtttttaggtgatttatttattttggttttttaaagtgttgggattataggcgtgagttattatattttattagtagtttgatttataatggtttttattgatttgggtaagtagttggtaagtgttgattatgtggttagaggaatagattttttcgttttattagtattgtattagtttgggtattttgtatgatttgagggagggagtttgaaaattgtttgatattggagttttagttagtggtgggtagggttggatttagagtttatttgagtgagtttataaagaaataagatattatttgtagtttaggagttgtggggtaattatatttgttgtatatatgtggatatatatgtttatttttatataaatgtttttagatagatagagaaggatttagtaatagttatgagtttgggaagtgggatcggatttttttttttttttaattgttttttttttaattgaatagatttttttgtataataaaaatgtattttaaaattagaatgatagtaataataaatttagattgttaaattttttaaacgataggaaagttggtaattttgttttatgggaggggtaagtttgtgatttatatttcgatagtgatgttttttagttatggcgtgttttttgggtagttggaaaggaggttaaatatagaaaagtttgtggagtgtgttaagacggattaggtttggtgttagaatatttttttattttgttaatgagtaattatttcgtatttgtgttttagggatcggggacgtaggagtgagtaaagtatattggttttttagatttcgagatttagatgttaaaggaggggatgtgtgggttattttggtttagtaggaggataaggaaggagagtgagaattatagagggtttaggaagatttttaggtttggtataggtaaggcggggaaggtggtatgttttttttagggtagttagttttttagcgtttttttttaggaatttttttgcgttattgaggggttagaaggtttttttttaattaaaaataattttattttaaaaattaatataaagtaaaattgattttttttagtggatagttttatgagttttatatgtgtaaagatttatgtaattattataatcgattatgtaattattattattgaaatagaatagttttattgtttaaaatattttttcgggttatttttttgtagttttatttttttttttgttttcgataaattttttgttattttgttattttgatttagtttttgttgttatcgttttatttttttaaaagtgttatataaatggaattatatagtttgtaatttttgagaattttttttatttagcgtaatgtttttgagatttatttaagttattgtatgtgttagtaatttgttttttttttttattttaaaaatgtatgtagtttgatgttttttttttttttttttttttttttttttttaagtaaggttttattgtgttgtttaggttggagtagtggtatgataatggtttattgtagttttaattttttgggtttaagtgatttttttgttttagtttgagtagttaggattataggcgtgtattattatgtttagataatttttgtattttttgtagagatagggttttattatgttgtttagattggttttgaatatttgggtttaagtaatttttttgttttagttttttaaagtgttgggattataggaatgagtcggtgtatttggttttaattagtttttttaaattaaattaattaattaattggttattagtaggaaataaatcgatgagtttttatatttatatttatttatttaattattatttagataagatagttttaatttaggagttttttttgttttttttgtagttaatatgtagtatttttttttttgtttattttattttaaattaattattattttgattttttttttttttgagatagagttttgtttttgttgtttaggttggagtgtagtggaatgattttagtttattgtaattttcgttttttaggtttaagcgatttttttgttttagtttttcgagtagttgagattataggtatttattattacgtttagttaatttttgtatttttagtagagacggggttttattatgttggttaggttagttttaaatttttgattttaagtgatttgtttatttcggttttttagagtgttgggattataggtatgagttattgtgtttagtttgtatttttttttttttttatgagtttatggaagtttaagagttaattaagaagtaggtttttgtttttatattttgtatttttatattatttggtattataggtatttttttagtttttttaaaacgaggtttgtttagggtgggttttttttatagttttatttagtttgattttttttgttttttttaaaatatatataaaaagttaaatattttaggggttaggaaatttataattttaaagaaatgaagttttggttgtttagaggtgggagaggagaggaatattttagtttttttttaatttttagtagattgttgttatatgatatttataataaattgttttgttatgtaatatatttttttaaatatgattgtttttttaaatgtgatatatgttgggaaagttgtagggagattagttaataattatttatgggaatgttttttgaatgaaggagtttaggatgggtacgggataggagattttaagtaaggaatagataggatttttttgagagattttaatttaaattagataataaaatatatatattttttgaggatagtttaggttaatggaaatgtattgagtatttattagtaaaagttaattttgattgtttagtaggtattaggtattgtgttagttttggggatattgtaattaattagatagagatttttttgttttgtggagtttagaaggatagatatgaaatatataggattgaggtggtgatttttatataaggtggagtttagggtattataggtatgtatagttagaggatttaatataggatgtagattagggaaggttttttttagaagttaatgtttaaattgagatttgaaaatgatgaaaatataaaaatattagagtagggggagggggaatttgagttataagagatttagataagtcggaggaattaaaaaaattttaagatataaaagcgtatagatagagaggtgagttgggtttagaagaggttggtaaggtgggtttaattaaaaaaggtttagtggattttatattatggaatgaattgtgtttttttaaattcgtatgttgaatttttaatttttaatgcgattatatttggagatagggtttttaggtgatttaggttaaatgaggttttaagggtgaggttttaatttgatgggattggtgtttttataaaaggaataggatgtataagagagttttttttttttatatgtacgaagaggttatgtgagtatagagtaaaatggcggttatttataacgaagtaaagaggattttgggttaggtgcggtggtttatatttgtaattttagtattttgggaggttgaggagggtggattatttgagattaagagtttgagaatagtttggttaatatggtgaaatttcgtttttattaaaaattaaaaattagttaggtatggtggtgggcgtttgtaattttagttatttaggaagttgagataggagaattatttgaatttgggaggtagagtttgtagtgagtcgagattatgttattgtattttagtttgggtgatagagtaagattttttttgttttaaaaaaaaaaaaaaaaagagaaagaaagaggttaggcgtggtggtttacgtttgtaattttagtattttgggaggtcgaggtaggtagattataaggttaagagatcgagattattttggttaatatggtgaaatttcgtttttattaaaagtattaaattagttgggtgtggtggcgggtatttgtagttatagttattcgggaggttgaggtaggagaattatttgaattcgagattacgttattgtattttagtttgggtaatagagtaggatgttgttttaaaaaaaataaaaaaataaaataaaataaaataaaagaaagaaagaaaagaggattttgaaagtttgaataaagttgattttgttagtattttggttttggattttttagtttttagaattgtgagaaataaatttttgttgtttaagttatttcgtttaggatattttgttatggtagtttgagttgattaatatattatataagaattttgagtatatttttaaaagtttggtgggaagttattggagttttaagttagggatagatatgcgtatatttgtgaggtttattttggcggtagagtggagaaggtatttgagtagggtaagattagaagtagagagatgaggtaggaggtgagggtaggtgtttaggttggagatgatgttggaggtttagagtttggtgatgtggggatgaggaaaagtggagagattggagagatttttatggggaaaattaaaggatttggggattaatagaataagaggagaggggagggggagtttaaaggtttttaggtatagtggaaagagttttgggttgggaatttaaagatttaagttttatttttagatttgttatttaatggttttggttaagtggttttattattttttattattttagtttttttatttgtataggaagagatgggtttgttgattttatggtgtcgtttaattttattattttgtgattttgtgaagtaaatgtattaataagataaaataatggtgttatttttttaggattgtttacggattttttttttatattttatttaatattattgattatcgtttatttagttgtatattagaaagtttttattattgatttgttttttttaaaagattgagattttttcgagggtaagaattgggttattttgtttggtattttgtatttgaaattaagttaggtatatagtaattgattaattatatttgttaaattgattattgtaagtgttgggaagataggtatatggttatttcgggaaggtatttgggtatgatgtatgttttttgagtatagggtattgtgatgggtgttagggttattagagtaaataagaaaattagttatagattttacgttaggtagttaggtagatattaaatataagaggataaaaatgatgatttatttttagttgtggtgagtgttataaggaaaagtattgggtattgtgagtgtgtaataaagagattagtttgggggtagagggaaggtttttttgaaagaatgatttttaaaataataaggatgagtagatttgtttatagattgaaggaggggagagatagagagtatgattgtaggtaaaagaagtaataagtatatatgaaggtttgaagttggacggagttttggcgaggagaatgttagatggaaatttatcggaatgtaatgttagttaatttgggttatggaattattggtgttttttatttttttttgtgtatattttgtatattatagattttttataataaatatgtattattttaattatgggggttggggggggtattgttagttttaataaaataataaaggatgtggggagtatgggtgtttggaggaggggtgtattttagagggattgatgatacgagcggtgattaagttttgtatgggggagggtaggaggtttattagtggggttggaataaagtagtaaggatgatttataaaagatatagtcgaagttagtgtattagggttcgtggaggtgaggttggggagtcggaggtgatatgagaagtcgtagggagttattgttagattaattaggtagggatagtttatatttgagtagaggagaggatgaggaattagagagaaaaagttttttttagtagtttttgtggggttggtataggattttgggaatttggtaagggtagagttttttttgttattttttaggtacgaaagggttagattgtttcgtgttttttgtttttatagcggaagtggaagttgtggtttttaaaggttttttttgatttgtaatttttgagaaattaattaaagagataaagttaaaggttggttggtggtgtgtagtgggcgcgggggtggattataggtaggagttggaaaattgaggtttgatgtaagttttaagattcgtttttatttatttttgattatgagtgataagtattttattatttattttgttatttggtcgggattttttcggagtttgtgaagtatttttagggttgggatgtgatttgggaggaggtggtaattggttttttttttcgttttgagttgggtttttaggaattgtttttattacgtttttttttttttttaggggagttatttagtatagtttgattgttttatttgaattttttttagtattatttatttattttatatttttgatttaggtgttgtttgtttatagttagggtatagagatgaggagtaattttattttagttttttatttagttttaaagttgaatttcgtaataggatttggttttgattttgtttttatgaagagatgtaaaattatattaaatttttatgttaaattattatatgtattaaatgttaattagttagtaagtagtcgagggtacgttgtttatagttttatagttaggtttgtgttgttattagggtgtagaggtaggggttttgaagaaatagttttagtttttaggaatgttatttgttgttggagataataagtttttaataaaagttatattaatttagaagatttgagttatttgagagagattatttgcgtttttaagttttagtttttttaattgtgaaatggtaatgatagttagtttagaattaaatgatgtcgtgtatgaaaaatagatgagagatttagaaggatttcgtttttttatagatatttatttttgggttaatgtttaggatataaagataaagtaaataaacgtaataggtttgatttttgtttttaagaggttttttaagttgttgttattgttgatttaatgatagttaaataaatgaaggttatttataaaaagtaaatggaggtttcgatagagtgtggtcgatggtattttttaaagttgggtgtttttttttatttgttttttttgttttatgattgatattttaggtaggggttatgttttttttttttgaatgggagcggggttgtgattattttgattaatagggtaggagggaggtgatgtagattaaaaaaagatgaggttataaaaagaatgtagttgggtatagtggtttatatttgtaattttaatattttaggaggttgagatggatagattgtttgagtttaggagttggagattagtttgggtaatatagtgagattttgtttttataaaataatgataataataatataaaaattagttaggtatgttggtagtagttttagttattagggagattgaggtaggaggattatttaagtttgggtagttaaggttgtagtgaattatgattgtattattgtattttagtttgggtaataagagtgaaatttcgttttaaaaaaaaaaaaagtagtttatgtttggtttttttatagtaatttagttattatgtaagagaaattttaattagattataggtagaaattttgaggtttttgagttaattgttagtatttattgtaaagtgtttgtagacgattttagttttttagttttcgagttttttagttgtagttttagataatatggagtagagataagttatttttattgcggtgtgtttaaatttttggtttatagaattcgtgaacgtaataaagggttgttttatgttataaaattttgaggtaatttgttggataataaaaaataattagaatatagaggataagttagaatgagtagtatataagtcgaaggagaaagtattttagaggtgttaagagttagttagaatggaaggatattaattgtggaaagtattattagattttacgttattatatggttttgtattttgttttgttgtgaaattttttttttaaaggttattagtaatttttaaagtgataaatatataaatttttttttgtttaaattattatttaggtttgcgttatggtttatatttataattttaaaattttgggaggttgaggtagtaggattatttgagtttaggaatttgagattagtttgggtaatatagtgagatttttagtttttaaaaaaatgtttaaaaaattggttgggagtggtgatatatatttgtagtattagttatttaagaagttgaggtgagacgattttttgagtttgggaggttaaggttgtagagagttatgattatgttattatattttagttagggttatagagtaagattttttttttaaataaataaataaataaataaataaaaaaatttttataaataaataaataaaaaattttattatttgtgcgtcgaagttttttattttaatagttatatatttagttttatttttttatttgaatttttgttttgtagttttaatttttcgtagttatatgttagttttttatttttttgttattttaaatttaatataattaaaatggatttattattatggatattgtttgggtttaggttttttttattagtgagtttatttattttttagtttttgggaatattagttgataattatatataattgtttttttttttggagaattgttttgggttaaataggagttaagttttttttttttgtatatattttggatagatttttagtggttgtttgattttaaagtagatttataaaacgttagtttttatgtttttaagtgtaattgattggtgtaatttgttgttttgagtttttttatgagtttaggttgaagtttatatttttgtttagttttttttttttttttattttgttttttttagttttttttttgagagtttttcgtagtgtattttttgaataaaagtttttattttaggttttgttttaaggtagtttaatttaaaatatttgttgtcgagtgtagtggtttatatttgtaattttagtattttgggaggttaaggtgggtagattgttttgagtttatgagtttaagattagtttggagataggttggatatagtaaaattttgtttttttaaaagatataaaaaaaaaattagtttagttttgtggtatgcgtttgtagttttagttatttgggaggttgagataggaggatcgatcgtttgagtttaggaggtagaggttgtagaaagttgagattgtattattgtattttagtttgagtgatagaggaagattttgtttcgaaataaaataataataataataggtcgggtgtcgtggtttatgtttgtaattttagtattttgggaggttaaggtgggcggattatttgaggttaggagttggagattagtttggttaatatggtgaaatttcgtttttagtaaaaataaagaaattagttggttatggtggtatatatttgttattttagttattcgggaggttgaggtaggagaattatttgaatttgggaggtagaggttgtagtgagttgagattgtattattgtattttagtttgggtaataagagtaaaattttattttaaaaaaataataataataaataaaatattaattaagttaagtttattttgtttattttgttgttatgagatttgttttttattattttagtttataatttttttttagattagttattagtttgaatatattttttagtaaatgttttttattttttttttttatttttattgtttttatgtaattattgtttaggaagttagggattttaaacggagggattagttgaagttatggtagaagaatgtggattgtgaagattttatggatatttattagttttttaaattaatatttttataattttttatgtttgtttttattgtaatttttaaatataaattgtgaagattttatggatatttattatttttttagttaatatttttgtgattttttatgattgtttttattttaattttttaattttgttatttcgtaagttaaggaggatgtatgtcgttttaggattttgtgataattgtattaattgtataaattgtagagtatatgtgtttgaataatatgaaatttgggtattttgaaaaaagagtaggataatagtaatgtttagggaataagagagataattttaaattttgatcgtcggtgagttgggcggaatagagttatatttttttttttttaaaagtaaatgggagaaatattgttgaatttttttttttagtaaggaatatttttgggaaagagaatatacgtttgggggtgggtttttgaattggtttttttgggcgtggttattttttatggtcgaggttgtaggggtgaaatagattttagtgttttatagcgtttttaggtttattaggaagaggaaatttttgtttaataaattttggttagattagttttttttaaaattttgttttttgataaaatgttattaatgataattgtgttagaaattttattagtaattttaatttcgtttcggttttgtggttttgtgatttcgttttgtttttatttgtttttcgatattttattattttgtgaagtatttgatgtttgtgatttatatttatttatatattttttttttttttgaaaatttttaataaaaatttgttggttttgcggtttgcggggtattacggaatttattaatatgtgatgtttttttcggatgtttagttttaaaattttttttttttgtattttgtttttttattttttaaattggtcgatgtttaggaaaatagaaaagaatttacgtgattaatggggtaggtttttcgataattattttatatttggtttatgaaataatttttttttttaatttttttgttgttttttgtttttttttttgtttttaatttgtttagtatttaagtgtgagattaatatttttgaaatgtttttgattatgtagtttttttgttggaaagtttagtgttttcggtgtttagtggtagtagataaagatttttttgtttgtttttttggttttttattgagttttggtttttattttgtttatttaattttatttgttagtatttttaattttttattttagttagtttttttagagttttataaattatgtttatttttattatattaatattagtttttttttttttttatatgttttcgaattttatttggttttttagttgtttttcggtttttgtttttttttttttagtttttagtagggtatatggttgtttgtaggaagtaatagggttttaagtttttttggtagttagatgtggtagagagatttttttttaatttatttgaaatgagtagaaatgttacgggttatttttgtttgtggatttattaggatggggtgtgtatttttttgtttttttttttttttttggtttgaatatggagtttgagtagttattttaaattataaagagttatgtattaaagatagtgaggtagtaaggcggagttgttttagtttcgagttgtttgtttggttttggattttgtttttgttagagagaaatggatttttatttaggaagttattgttttattcggtttttgttatttataggttaatttaatgttaatttggttttttttataatttgtgaaggaaagaaaggagtagatgtggtagtggtttgtaaatgtttaatttttagaggtagtggagggttgggggtaggtgaaagttttgatttgtaatattttcgatttttgtggtgtaaatatttttattaaggtgttggggtttagaaaatgatattttagagtttggtgttttggtaagttgagaagaatatgggaaggatttgagaagtaaagtttgtttttgatttttttttgttttttttttttttttaaggtaggttaaagaaattagaatgttttttttttaaagttaattataaaatttagaattattattttagtttttttttgtttttttgtataagtatagtttattaaaaaaaaaaaaaaaaattgagttattttttttaatagtaggttataaaatttttattttggagagtttttgtttatatttagaaggaaggaatgttgtatagagagattaagtagaattttaatagataggttttgttggtttttttttttagtttatttttatgcgattatttattttgtgtttaattatattttttttttttttttttttttttttttgagatggagtttcgtttttgttgtttaggttggagtgtaatggtattattttggtttattgtaattttttttttttgggtttaagcgatttttttgttttagttttttaagtagttgggattataggtacgtattattatgtttagttaattttgtatttttagtagagatggggtttttttatgttggttaggttggttttgaattttcgattttaggtgattcgttcgttttggtttttttaagtgttaggattataggtataagttatcgtgtttagtttgtgtttagttatatttttatatgattgtttgtttttttttttttttttttttgagatagagttttattttgtggtttaggttggagtgtagtggtacgattttaatttattgtaatttttgttttttaggtttaagtgatttttttgttttagttttttgagtagttgggattataggtatatattattacgttcggttaatttttgtatttttagtatagacggggttttattatattggttaggttggttttaaatttttggttttatgtgatttttttattttagttttttaaagtattgggattataggtgtgagttattgtatttagttttggttgtttattttttatcgaaattaattaaaaaaattgttttttttgagtatttttggggtttttatttttgaaggtttttatgttatgtaaaattttgatgaaataaatttgttggtcgggtataggggtttatatttgtaattttagtattttgggaagatgagataagtagatggtttgagtttaggagttcgaggttagtttgagtaatatggtgaaattttatttttataaaaaattatttgtgtgtggtggtttgtatttgtagttttagttattttgtaggttgagttaggaggattgtttgagtttaggaggttaaggttatggtgagttatgattatgttattttattatagtttgggtaagagtgaaatttcgttttaaaaaaatagatatataaaataaaataaatttgttatgtttttgttttgttcgtttgttttttgttatgggagtattggttatgatttaggatgggtgtagaaagtaattatatttttttgtttttataaaggttaattttaagttattaatgttatgttagttggtttataaagtttttgaaattataatgattttttttatgaattggtgtgagttggttttagtataatagtgggtgaatgggaaggggtgaaatgggattgatatttaatgaattttgttatatgttaagtaaggtaataggtattttgtatatattttttttaatttttatatttaatattgaggggtaagtagggttaaatttttttaattattaattttttttgggaaaaattttaatataggtagatttatttttttatatattttttataattttggaagatatgttagttatttttgttgtggataattagaaaaagtagaaaatggaggtaagagaaaatgcgaatgtggtggatattttttgaggtttgattattttgtatgtattttttttttttgagaatagttattggattttttggagaattatttgtgtgtatttttaatgagttatggttaaggtgtgtttttttttttagtttttatttagattaggttgattagattttttttgttagggttttgaatgatgaataaaatggaaaggatggaaaaaattttttgttatttatttattttagtaggtagttaggataatatcgtcgatttttgttattttattcgttggagttattttggttttttgttttttgagtttgattttttggtttttttttgattttgtgagttatttaatatttttttaagatttatttattttgtttaagttaaggataattatttttgtggtttgaagttaaagaaatttaaatgttaaggaagaaaagtagaagttttttagaaaagttaaaggaaatcggttaggcgcggttgtttatatttgtaattttagtattttgggaggttaaggtgggcggattattcgaggtcgggagtttaagattagtttaattaatatggagaaattttatttttaataaaaatatagaattagtcgggtatggtggtatatattgtaattttagttatttgggaggttgaggtaggagaatcgtttgaatttgggaggcggaggttgcggtgagtcgaaattaagttattgtattttagtttgggtaataagagcgaaatttttttttaaaaaaaaaaagagaaaagaaaagttaaaggaagttaaggcgaagtgtatagggttttagaagaatattttaaaattgtttttggtagggaagtggttatgattatgtaaggagaatttaggtaagattggttagattgtagggttggatttttatgtgttttatacggtaggaatttggggtagagtcgatgttatataagtttgagttgtaagttatttgacgtatgttattgtatgtttattataggattattaaataaaggtaatttaaattattttgtattaagagtatttaaattattttatatttgtagaattattataaaatatgtgggagtttgtttttttaaaatgcgttattttggtggaggattggagagaaaatatggattattaagaattttttattaatattttattttttagaaagtaaaatgaattattagtagtgggtttagcgtagtggttttcgtttgtaattttagtattttgggaagtcgaggaggattatttgagtttaggagtttgagatcggtttgaataatatagcgaggttttgtgtttataaatagttaaaaaattagttagatgtggtggtatatatttatggttttaataaattaggaggttgaggagggagaattgtttgagttttggtagttgaggttgtattgagttatgattgtattattgtattgagttatgattatacgattatattgagttatgattatattattgtattgagttatgattatattattgtattgagttatgatcgtattattgtattgaaatatgatcgtataattgtattgagatataattgtattattgtattgagttatgatcgtattattgtattgagttatgatcgtattattgtattgagttataatcgtattattgtattgagatatgatcgtattattgtattgagttatgatagtattattgtatcgagttatgattatattatggtattgtattttagtttgggttatagagtgagattatgttttaaaaaaaaaaagtaaataaaaattataagtaattgagagtttgggaagtgtttagtagggaaattaggaattgtatttgtgtttgtgtgattattttatatttttgttggttttgttttaataaaagtttttttttattattttatttatagtgattttattcggttgcgaatgtttagaatgtttgttttttgtattaatattttatttgtttgatatttattatggggatttgttgagtttttatatgaggaaaagtatttgttaagttttaagatattaaataaatgttagttaattatgttattagataagtaggtagatagataataaatagatgtatatatatatatagttatagatatagttatagttttgtatatttatatttatgtgttgattttttaattttttttaatttggttataaattttttaagatttatattttatatatttttttgttttttattgtttttagttggaatatatttgataatttattgatgttttaagtgtaggaattagtttttattagttgaaaaatttgtgaattatggttatttatttttattatttttttgtgttttgggaggattagatgagtttatgggtataaagtgttatgaattagttagttttttgtggtcgaagatagaagaatttagtagttttagttttttttttaattttatgtttttttttttgaagaagtatgggttatgtatgtgattagaaatgggtttttattttttagtataagatttttgaagaagaagtggtttttggatttttgaatgggtagtgtgcgatataatttaatgagagataagtgattttgatttttttaaaagtgttaaaagtagattaaagttattagtttatattaagtatttttttaatgtagtattttttttttttttattttatttgttatttagtttagtgttgtttaataaatttttttgtaatgatggaaatgttttattttcgtgtttttaaatatggtaattattggttatatgggattatcgtgtttttgaaatgtggttaatgaaattgagaaattgaattttaaattttgatttattagaatttatatttaaatagttatatgtagttgggcgtagtggtttacgtttgtaattttagtattttgggaggttaaggtgggtagatgatttgatgttaggagttcgagattagttcggttaatatggtgaaatttcgtttttattaaaaatataaaaatgttgggcgcggtggtttacgtttgtaattttagtattttgggaggttaaggcgggcggattacgaggttaggagatcgagattattttggttaataaggagaaatttcgtttttattaaaaatataaaaaattagttgagtgtggtggcgggagtttgtagttttagttatttaggaggttgaggtaggagaatggtgtgaattcgggaggtagagtttgtagtgagttgagattacgttattatattttagtttgggtgatagagtgagattttgatttaaaataaataaataaataaataataaaaatataaaaattagttgggtatagtggtataagtttgtaattttagtaatttaggaggttgaggtaggagaattgtttgaatttgggaggtagaggttgtagtgagttaagattatgttattatattttagtttgggcgatagagtgagattttattttaaaaaataaaataaaataaatagttatatgttattgtattagatagtatagatttaaattaagagaatttgggtttttttatttatttatttatttatttattatttagttaaaattattgagtatttagtatatattaattaggtatattgttgaatattgatagtgggtttagtgattagttttttatttgaaaaagtttaaaatttgtttgaggaaataaatgatttttggggatggttttaagattttaaagtgttttttggttatattatttttttttgagaaaagtatttgggagtaagtttttgggtataggttattttgtagataatttttcggttttgattttatttattaaattaggatttttgtttgagttaggggtagtttttaagggttggtaagaggttagtgatgtagttagaggtgagaatatttaaaaaggttattgtattttggggagtgtgtatataatttatttagagttttaatttaagatataagtaaggatatgaatattagagtagtgtaaaattttaaagataaaaagagttaggttagtgggttgaataataatattaataatgaggattgttgagaggtaggaaggtgttgaggttaatagttttgtttttggagataaattttttggatgttaaatttaattttgttatttttttgttttatagagttttgtgttgttattgtatttgtataatgagtgttgttatgttttttttttagaggtgtattatgaaaattaagtgaattaaaatatatagttgtttaggtatggtgttttatatttgtaattttattattttgggaggttgaggtaggaagattatttgaagttaagagtttgagattagtttgggtaataaagtgagattttatttttattaaaaaaaaaaaaaaattttttttaattagttgggtatggtggtatacgtttgtagttttagaaatttaggaagttgaagtggtaggattgtttgagtttaggagtttggggttatagtgagttatgatggcgttattgtattatagtttgagttgtagtggaagattttgattttaaaaataaataagttaggtatggtggtttatgtttgtaattttagtattttgggaggtcgaggtaggtagattacgaggttaggagtttaagattagtttggttaatatagtgaaattttatttgtattaaaaaaataaaaattagttaggtatggtggtatatgtttgtaattttagttaattaggaggttgaggtaggagaattgtttgaatttgggaggtaaaggttgtagtgagttaagattatgttattgtattttagtttgggtaatatagtgagattttattttaaaattaaaaataaaaaataaataaataaatatggagttgaatttaggtagatgggttttagtatttatgttttgataaataggtatgttattaggttttggaatgaaatagatttaggtttatatttaatttttattattttttggttatataattttaagaaagtgaattgttttattgaattttattttttttatttgtaaaatgggtgtatagataaaataatagttggggttatgaaggtttaatgaattgatttgagtatagtttttaaaatagtgtttatgtcgggcgtggtggtttacgtttgtaattttagtattttgggaggtcgaggtgggtagattacgagattaggagatcgagattattttggttaatacggggaaattttatttttattaaaaatacgaaaaattagttaggagtggtggtgagcgtttgtagttttagttattcgggagattgagggagagaatggtatgaattcgggagttggagtttgtagtgagttaagatcgcgttattgtattttagtttgggttatagatagagtaagattttattttaaataaataaataaataaaaaaaaaatatatagtgtttttgaggtattatatatgtttaggtgtgtgggttagtgttattttatattattttataagatttgggtagagttagttattgtagatagagatgttgagttataaggagtttgggtagggaggtagggtgtgtttttggggttgtcgttgggtattggaagttattgtggtttttggaagatatgttggttttttaaggggtaggttattggttattgaggtggttttattttagtttatttttgttttttgaggtaatttgagtggtaatttgttttataataaaaaaaatatttagttttggtatattttaagtaagaatttataagaggaatattttgatgtagtttttttaaaatagttttgttagtatgaattattttggaaaatagtatagtaaattttttttttttttttttttttttttgagacggagtttcgttaggttggagtgtagtggtgtaattttggtttattgtgtaattttcgattttttggtttaagcgatttttttggtttagttttttgagtagttgggattataggtacgtattattacgtttagttaatttttgaatttttagtagaaacggggttttattatgttagttaggttggtttcgattttttgattttatgaattgttcgttttagttttttaaagtgttgggattataggtatgagttatcgagtttagtttttattttttttttttttagaatggggtttcgttttgttttttaggttggagtgtagtggtgtgaatgtgatttattatagtttcgatttttggatttaagtgatttttcgatttgagttttttagagtagttgggattataggcgcgtattataatatttggttaattttttaattttgtagagacgaggtttttttatgttgtttaggttgattttaaatttttgggtttaagaaatttttttgtttttaggttgggtatggtggtatatatttgtaattttagtattttgggagattaaggtgggttgattatttgaggttaggagtttgagattagtttgattaatatggtgaaatttgtttttattaaaaatataaaaattagttgggcgtcgtggtgtaagtgttgggattataggtgtgagttattgggtatagtagcgattttttattaagttaaatatgtatttagttatattatttttagatatttgtttaagagaaataagaatatatgttttaaaaaagagttgtttatgaatgtttatagtagttttatttattatttttaaaaataagaaaaaaattataatgtttattaatggtgaattaataagttaattgttatatatttatataatggaatgttatgtagaagttaaaaggaaagaattattgaattatgttatgatatggatgaattataaaaatattatattgagtaaaagaatttggatataaaagagtgtttattgtagtttcgttttttttttttttttttttttttttgagacggagttttgtttttgttgtttaggttgaagtgaaatggcgtgattttagtttattgtaatttttgttttttggggttaagtgatttttttgttttaattttttaagtagttgggattatagttattcgttattatatttggttaatttttagtagagacggggttttattatgttggttaggttggttttgaatttttgattttagatgattttttcgtttcggttttttaaagtgttgggattataggtatgagttattttgtttagtttgtagttttatttatatgatattttagaataggtaaaattgtaaggttagaagtttgattagtggttgttataggggatggggataggattgattataaagggatgtagggaatttttgggggtgatggaaaattttatattattatggtggaggtttttatataaattatatgtatttattaaaatttattaaaaattatttttaagaaggatgaattttattgtatttaaattatattttaatttatttgattttttaaaataaaatgtagtattattaaatattattaaattttatgtgaaaggtttagggttagagataggatgagtttaatttatagggataggttgagaatatttggtttatatattttttattgattttttttttttttgagaagttttgtttttgttttttaggttggagtgcgatagcgtgatttcggtttattgtaatttttgtttttcgggtttaagcgatttttttgttttagttttttaagtagttgggattataggcgtttgttattacgttaggttaatttttgtatttttagtagagacggggttttattatgttggttaggttggtttcgaatttttgattttaggtgatttgtttatttcggttttttaaagtgttgggattataggaatgagatatcgtgtttggttattgattttttttttaatggtgataatttaataataattttaggttttgttaagaggttattagtattaagacggttgtattttaatggtacgtgttttttttggtaattaaaaagatagataaatgattataatatcgtgtgtgtgatgttttgagagatttgtatataatgtagatgaattaattttggatggtaggtttaggagtggtttttttttaggagaatagggaggaaaaaggaaaagaaatagaacggttatagggtttaatgggtaagagtttggtatgtgtgagaaaaaggataaaattagagatgtataatattaagaagtaatgggggtgttgaaagagaaagtttgtaaggtgtttggatttgggttgggaatttagagagtttggagttattgaatttattgaagtaggtatggatatggttaagtttgtttttgaataagaaagttttggggggtataggaggtgaatcggaggaataatagttaggaaggttttttatggtttatgattgttttatttttattaaaataaaatgtgtttttttggtagtgaattgttttgaatgttaaaagtattaggtaagttggttttaattggaatattgtagttttgagggtggttcggttgtttagttatttggtatttttttttttttttttgaattagagaattttagtttttaagaaatttattaatttaggtttttagggttagtattatttggtttgtgttagagatatagtagttatacgtataaatttaaatggttatggttgatagtggaggttttagtagggttaaggaatatagagatttgtaatttttttttgtgtgtaattttttttttatggtaggtgggatttttaatttggggaaagaaatgattaagtgtttgggaagggaaagtgttataaaagagttagggtttaggagttaggatgacggtggtttgaggtttagatattttagggaattcgtgagacgtggagagaaaatatgagggaaagtagagttattgtttggtcggtttagtttttttttttatgagtttatgggtaaagttaggttaggtagagggtgttagagattgagtgagtttgttttttttttaatttggttttgagttatatatggtatttattttttttagaaaatcgttttagggtttattttttggtagtttattaaattttagtattgatacgcgatttttattgggtagggttagggagttgtagataggttagttttagtattcgttttcgtttttggagaggttttttggggaatgaattgttttttttaattttggaagaaaagagtttatggtaattgttttggagggtaggttggaggtacgtttaatttttgagtatatatgggagacgttgttgaattatggggttttagaggaggagaaatattagagagtttttaatttatgttttttattttgtagattaatttatttagtaaatacggggtgtttgaaaagtttggataaaaggggaaatattttatttgttgtgtattttttttttatgattatgttttgattttaatttttattaaattttttaatggttgatattggagttgtttatagagagatgtaggttgttttttacgggaatagtattgtaatagtaatgatattaacgattttgtatttttagtttttttagtagtttgtattgattgataggtatagttttaggtattgaaaatagagtagtatataagatagataaagttttattttggtggagttataatttggtgggaaagaaattaagattaaaggaggagttataatattggggttttaagaagtcggttttggtagaaggataggaatgttgggtttttttttagttttcggtttagtttatagtagtttttagggtagttgggttgagttgggttgggttaggttgagttgtattttagggtagggttatcgtgttatttttgtgattttgttttggtgttttcggaatttttgttatggttttgcgttaggggaattgttagggtttgattttgggttttttagagtttagatgaatatttttaggggttatttgttaatttgttgtttagaatttattattttattttatttttatgtttttggagaattgttttagttaaaatgtaggtgggaggggatgtttaaaattatttgttttttgttagtatagtggtgagtaaaaataaatttttttttttgttgggtgtggtgtttacgttcgtaattttagtattttgggaggtcgagggggcggattacgtgaggttaggagttttttagattagtttggttaatatggtgaaattttatttttattaaaaatataaaaattagtcgggtatggtggtatgcgttattcgggaggttgaagtaggagaatcgtttgaattcgggaggtagaggttgtagtgagtcgagattgtgttattgtattttagtttggacgatagagtaagattttttttttttttaagacggagttttattttcgtcgtttaggttggagtgtagtggtgtaattttagtttattgtaatttttgtttttttggtttaggtaatttttttgttttagtttttcgagtagttgggattataggtatacgttattacgtttagttaatttttgtatttttggtagagacggggttttgttatgttggttaggttggtttcgaatttttgatttcgtgatttatttattttaattttttaaagtgttgggattatgggcgtgagttattacgtttagttaaattaaattttttaaataaataaaggttagattttgtgtttacgtttgtaattttaatattttgggaggttgaggcgggaggatcgtttgagtttagaattttgagatttgtttgggtaatatggtaagattttgtttttattaaaataaataaaaattagttgggtatggtggtacgtttttggagttttagttatttaagaggttgaggtgggaggattatttgagtttaggaggttgaggttgtagtgagttatgtttatgttattgtattttagtttgggtgagagagtgagattttgttttaaaaaataaataaatatatatataaaaaaataaaattatttatattagttgaataggaattaggaatgtagaagtttttgtttttttggaaaataaagagttataaaatttgtttgatatggagagggagggagggtagagtaaaaagagaaagaatttgtattttttggtgatgttagtagttagaggttatttttttattttagttttttatttttgggttggtttattgttgtttatttttgttttaaagtagtttttttttttataattataataatgtttttgttttatgtaagaagtatttattatgtgtttagaaggagtaaatttatatgtttaatttttgtagttatttagaggttaatttgtttatttattaattgaggaaatagatttttagtaatattaagtaattggtttaatattgtttagttaataagtagtagagttggtatttaaatttaatttcgtttaatattattagattataatatgttttttttgttatttcgtgttttttttttattttaaatttattttaagttattaagtagttattgaggatttattgaatattaggtgtagttaaaaagttttttttttgttattttttatttttaggattttggtgtagtttttttattttgttttttttttttagatgtttttatttttaaatttttgttttttttttttttgtttattttgttttcgttagtgtttatttttgtcgtttttcgttttgggtttgtggttagtagtgtagtagtatttaggtgaggtagtaggtttgatttatttttatgttagggattgtaaagggcgcgggttagggttttgttgtcgttgtcgttattgtataattgtttttgatttagcggcggattatttgagttatatttgagtgtttttaattttttttttgaagagtaaatatgggggtttttaaaggaatatggttagataaatagatttttttgtagatgaggtttagtttttcggaggagatagatttaagaatatttattaagtttttattaggtgatagttaagtattggagatattatagagatttaatgagaaaaaggttagatgtggttttgtatattcgtggagattatattttagtaggcgggataaataatagtaaaaagtaaatatataaaatgattttttaacgtgatatgtgttatgaagaaaaataaggggttgagaaggaggttagtagtggtgatggattaaggtaaaggttaaacgagggaaatgaaggaatatggtgatttgggggaagatgggaaggaaatgaggaggagagttggaaatggaggaggttaagggtttgtttttttagtattagggtagtgggagttagtttagttgttcgttttagtttttggtattttttggttttaatttattttttagtttgtatttttttatttttttattggtttaatgatttatttttaatatttttttagttttttgtgtggtaggaaggagtaggagtagagttttagggttttgagggtagtaggaatggggatgggattggttgggaatggtgagtagttcgggtttttaggttttttttttgttttattttggttttgttataaagaaaggtttttttgtgtcgggaggatagcgaggataattagatttagttggaggtttagattttagatgtgggaggtagtggtaaaataagattttggtattttttttatttttttttttttgtttaatgttttagagaaattttttattataaataagtaatgtatttttaatttttggtgttttttttttttttttatttattagtttttttttattattattatttttttttatttttaatttatgtttatgtgagtgtgagggtttgtttatatgtgtaagtagttatgggtttatgttggttattgtgtagcgtgcgagttgttttggaataaggatgttgggggtggtgggttttttgtgtttgggtgtaaatgtaagaatgatggtaggtgtgaagataggcgtgggaaagtaatgcgtttttgtttatagaggaggtgtgttttatgttagttaggaagaagtgtgtaatgtggaagggattttgtgtatttagataagagtagtgagtataaaataaagtgatttgtaggtttaggaattgtatatagagtagtagtgtatttttagtcggttgtggtttgtttttttatttgtgtttttatatgtttttgattgaaaaatttttttaagtgttttttaagtgggaggggagaaaagtgttttttgtttggtgtttgtgtaagaattgttttagtttttttaaagatgttgtatatttgtatgagtggtttggaggagtgtagttatattttagaagtttggtgtgatttagttaaggtgggaatattatatgtatatttatagttgtatattttatttggtatttaataagattattgagtaattgttgtttataaggtattatgttgggttttttggaggatataaagatgtgtatgatatagtttttagtggaagagattatatatgtatttattttgtgtattaggtttaaaatgatggtagaaagatttgagttagatgtattttaaatttttggagttattttagatttttttatttttttgttgtcggtaatttttttttttttatgttttttttttttaatgatatttattttattgtttaattttgattattttatgttaggaatgttttttagggttatttttttaggtttttgttattatttatttgagtttttttaatagttttttgtttattgttttagtttttattcgtttagagtattattttttattttaattagttttttgtttgaatttttttttttttattttatttagtaatttataagttttatagtttagagtgaaatttaggtttttgatttggtagttttgttttttttattttgtttaattttatttttttttagttattattattttttattatttcgttataggaaatttattttgagattgttttttttgtgattttttaaatatattttgtatttttttagtttaaggtttttgttaattttatttttatagttattttttatatttgaatttgttatattttatttattgtttaaggttatttttagtgttatttttttatgaagttttttttgattgattggatagatgtgaatattagtttttttgggttttttttttaatatttagtttttagtttttttaggtttttttgtttttgtttttgttttttgttttgtttttgtttttttgagatagggttttattttgttatttaggttggagtgtagtggtacgtttttagtttgttgtaatttttgttttttgagtttaagcgatttttttgttttagtttttcgagtagttgggattatagatatgcgttattatgtttggttaatttttgtatttttagtagaaatagggttttattatgttgattaggttggtttcgaatttttgattttaaatgatttattcgtttcggtttgttaaagtgttgggattataggtgtgaattatcgtgtttggttttttttaggatttttaagaaagtttgttttttttttaggtagaaatttaatataataaaaaaagagagagagagagagtaatagagatagatagatagagagtttttttggttatggttttttttttatgtcggagggtaaggtttttatggttggagtattagttttatttggttttttttaggtagttgtatggtatagtatttatattgaaattagttttaggatttttaatagtagtatttttaatagagggcgtttgaaataggtgaatgtttaaaagatgttaaattttgcgcggtggttgttagtattttgggaggtcgaggtaggtagattggttgagtttaggagtttaagattagtttgggtaatatggtaaaattttggttttataaaaaattttatatatatatatatatatatatatatatatatatatatatatatattagttaggtatggtggtgtttatttgtggttttagttatttaggaggttgaggtaggagtatggtttgagttaagaggtagaggttgtagttagtcgagattatgttattgtattttaatttgggcgataaagttagattttgttttaaaataaaaaaaaaaagttaaattttgtgtttatgagtagttgtttgtaaggaagttatggaaatgtgaatttgttttaagttgagtaattattattattgtaatatttgtataatgttttataatttagaatgtttgttttataaatttggttgtttgatttatagtaaggggtaaatttgggtggttgttaatttattgtttttgtatttgtggttttttgtattagtttttatgtgaatatttttgtacgtttttaagagagtagttttgttgaattgtttttatatagtttttgtatttttattgtgtatatgtgtgttggtaggtgtacgtggtatgtttttttttttttttaggattgtattttttttatggttgaataatatttaattgtgtattgttgttgttgttgttgttattttatagtgataaggttttattatgttgtttaggtttttgagtttaagtgatttttttattttagttttttaaaatgttaggattataggtaagagttattatgttttattattgtgtattatttttttaatttttttatttttttttttttttttaatttttattttaaattttggggtatatgtgtaggtttgttatttaggtatattgtatgatgttgaggtttggggtatgaatgattttgttatttaggtattgagtatagtatttaatagttagtgttttaatttttgttttatttttttcgttttttttttattggttttaagttgttattgttgttatttttatgtttatgagtttttaatgtttggtttttatttataagtgagaatgtgtggtatttggttttttgtttttgagttaattcgtttaggataatggttattagtcgtatttatgttgttgtaaagtatataattttgtttttttgtatggttacgcggtgtgtgtttttatgtgtgtttaggtaggtaggtttgtgtttgtgtgtgttagtgtgtttattttttttttaattttgattatttttgtaataattttttttttggggagtttatattttaaggatatttataagtgtatgaatgcgtgtatataattgggttagtattgtagtaggatggtttgatttttaataaaaagtttttttggtagggtacggtggtttacgtttgtaattttagtattttgggaggtcgaggcgggtaaattaaatattatatatttttatttataagtgggaattaaatattgggaattcgtggacgtaaagatggtaataatagtaatttgagattattagaagaaggacggagggagcgaggtagattacgaggttaggaaatcgagattattttggttaatagggtgaaatttcgtttttattaaaaatataaaaattagttgggcgtggtggcgcgtgtttgtatttttagttatttaggaagttgaggtaggaaaatcgtttgaattagggagttaggggttgtagtgagtcgagatcgcgtttttgtattttagtttggcgatcgaacgagattgttttatttttaaaaaaaaaaaaaaaaaaaggtttgtgagggattttgtggttaaagtgagtttttttttaggtgttatatgtttcgatatgtgtttgtagttcgggattttatttatttttatttacgatttatatatttataacgtgtagttgggcgtttaggattgtgtatgttaagtttttatttattttttttgtttaatcgtcggaatttttagttcgttgttgttaatcgttttttagttgcgggaggaggagttagaaggattcgtttaatttttaggagtatataaattatttttgtcggtagtcgatttttatttggttttatatttcgttcggtttattatgtgttattttcgtagttgttattcgattatgattattttgtaggtttcgatttcggttttttttattatttcgggatttcggcggggtttcggttttgagatttttattttcgattttttttcggagttcgtagcggtttttgtcgggcgttttagcgtttttcgcgggtatcgaaagcgtagtcgtagggttttttattttcgagtggtgagtatcgtcgaagtgggtattcgcggggtgcgttgttttggagttattggggaacgattcgattttagaggtttcgatttgatttgttttttgttttgtttttttttaggttcggcgttagttgttagtcgaggaatcgaatttagttaaaaggtttttttttttgttgtttattatcgttttttgttagattttgatggttgaagagggtgtgtcggcgtttttgtttttagaggacgtttttaacgtcgtatttttggcgtttatttttgtgtttttcgttttcgagttttttaatttgatttcggagttttcggattacgttttggattttagtatttttttttagtaatattcggtcgttttttaattgtgatttttcgtattttttaaaaagaattcgaaaaattataaagaaatattaggcgtatttggtgcgcgagagcgtatttttaattgggattttcgaggtaatttgaatttagaatattatagcggagacgttattcggtgtttgaggcgggatcgaggcgtatagagatcgaggcgtatagagatcgaggtatagtttagttggggttaggttcggtgggaaggagagcgtcgttaatttattttttattgtttttaattaatatttatatgtatttatgtacgtttttttaggtgatggagatgtgtacgtaatatttattttaatttatgtaagggtgtgagatgttttttttgttgtaaatgtaggttttttggtatttattgagttttgtgggattggtggaagtaggatatttggaattgcggtaaagtaggagaagaaatggggaggattcgggtgggggaggacgtttcggttgggatgaagtttggtggtgggtcgtaagtttaggaggtgattgtattttttagtattttaatttcgtttgtttattgtgtgagatttcggcggattattaggaatgagattcgtgagatttttttatttttttgaagtcgtttttagggtggttgcgaggtagagggttgggggttggtgggttgttacggagcgattgtcgagatcgtttagtatgttttgtgaatataaataaaattgatttattgtttgtagttttgagtgtatttttgtaagcgtcgattttttatttttttcggtttttagatggtaaggatcggcgggaggcgtcgtggtcgagtttttagttcgcgtatttttttgggtttaggagtttttttttttggagttatagaatttagtattcggttgtcggatgtagttttttattgtttagtttgcggtttttttaggtagttgtttcgcggcgaattcgagatgtggtaattatttttacgttagggtgttaggcggaggttaagttttttattcgggggcggagcgtggcgcggcgtgggcgggattttcggtttaagaagggcggtgattggggcggtagggatgtggtttttttcgggttaattaggtagttcggttgggttcgagagttagcgggcgggcgggttgcggattttagcggggtttgtcgggaaaggggcgggtcgagcgtattgggtcgaggcggggcgaagtgggggtgtttagttcgttgcggggggcggggtcgcgtttgtcgtagtaacggggtgcggtagggtggggaacgcgggagcggggttagtttttaggaaagttggtttgcgagcggtttttgttcggtttttaggtttttgcgcgatttcgtttttttcgagattttagtcgggttgtcgttcgcgtttcggaaggtgagtgggggaggggagatggagtttggggttgtcgagaagtagggagagaggggaaaggtttgtaggtttttgggcgcgggggatttttattaaagggagcggcgaggggaagggagggattatacgtaggcggagaagaggtagttggggattttaaggattttgtagggaaaagttttagcggatttatgggtgtagaagggacgggtcgtggcggatgtagattgggagggtttgacgggaaagggaaaggatgggtttttgtggacgttatagcgcgttttttttattcgtaaaggtttttttttttttttttttagttttagtttgaattatgttttttatttgtggtttaaatgaggttatggtggttttcggtaagtattgttgttttttttttagttagtgattttagaatttttgtgagtttggtttttgttttttttttttttttttattaattttttagtattagatttttgttttttgatggttacgaattgtttagtttgatttttattattttaaggtttagattgttttttttttagtttttagatttttttttgtgggttgttgtttttttattttcgttagttttttagttttttatatttaagttttgttatcgttttttattgttttatattttgtagggttttgtcgaagttttttagttatggtggttggagggcgtgtttttgttttgttttgtatttaatagatttagaggtaggtaagaagggaattagggaagggggattttcgttttttttttttttttttttttttattgtttgtttttttttttttttttaggattttttttaatatattgatttttaatgttaagagtgaaaaggtttatattcgttatggggtttttattttagttattggtattgtttaggtgaagtttttagagttttttttttatagtttatttttttattatttttttttttagatattaagatattttttggttatagtttttttaatttttgtttgtagagaagtttttttgttagttttattttttttaggtattttaaggtatttgttttttttttttttttttttttgaaatggaagaagtattttttagagggtttttttttttttttttgttttttttttgattttatgagatttttattatattttttttatttttattttggttataggtaaaaatttaggggtagaataaggagatgttggcggtcgtttgttagatgtttttggggaagacggaggttgagattgtttatattgttttggagacgttagagggttattagagggttattatggtttatatgattgtggaggttggtttaggggtagggaattatttggaaggatgttaaaatgaggggggtttaaggtttatattagtttgtgagagatagtggatttaagagtatatatttcggtcgggtagggtggtttatgtttgtaattttagtattttgggatgttaaggtgggtagattatttgaggttaggagttcgagattagtttagttaatttggtgaaattttttttttattataaatataaaaattagttgggtatggtgatgggtgtcggtaattttagttatttgggaggttgaggtaggagaattatttgaatttaggaggtagaggttgtagtgagtaaaaaaaaaaaaaaaaaaaaaatttatattttttttttttattattttgttattataggagatttataaggataggtagaaatttttagaataggtttttaaagtggtttttttagatttggttaatatgggtattagtgtggttagttatattttgaaggatatttacgatgattaggtaaaattaggtaattgatttttttttatttttttgtttttattttttaagttttttaaaggattaatttttatattttttttataggattatttgtattttttggggaaggttcgaatagtttaagtttaaaaagatgtacggattggagaagtagaggttaagagagatgttgggattcgggtgagagagatgggggttgtttagtgggaaaggggatagaagtggtataattgagaagaagtaggggtgttgggtgagtagggaaaatatatgaggtagaaagagaattttggtgggaagtaggttgttatcgtggtttttttttttttgttttgatattttttatttgatttttgtttggataggaagttaaagttaagtaggaaaaggtgtttgtttagtatttgagtgagatcgagatggttaaggtatagagagattacgaattgaagaaggtcgtttatgatatcgaggttaatattcgtcgagtataggttgatttggtttattagttttaggttagagttattgttaggttattttttgttttttttttattttttttaggttgtttattttaggatattattatattattttttatattttaattttggttttattttggttttttatttttggattaatttttttatatgaggagagatttaaaagatttagacgttatagttgaaaagttttaaagaaaaggttagtcgggtgtggtgatttatgtttgtaattttagtattttgggaggttaaggcgggttgattgtttgattttaggagtttaaggttagtttgggtaatatggtgaaatcgtgtttatgcgaaaaatataaatattagttaggtatggtagttcgggtttgtagttatagttatttggggtatgaggtaggaggattgtttgagttaggatgcgtaggttgtagtgagtcgagattatattattgtattttagtttgggtgatagtgaaattttgtttaaaaaagagaaaaaaaaggttacgcgcggtggtttatgtttgtaattttagtattttggtaggttaaggtaggtggattataaggttaagagttcgagattagtttggttaatatagtgaaattttgtttttattaaaaatataaaaattagttaggtatggtggtacgtatttgtagttttagttatttgggaggttgaggtcggagaattgtttgaattcgggagatagaggttgtagtgagttgagattacgttattgtattttagtttgggtgatagagtgagattttattttaaaaaaagaaaaaaaaaaaagagaaggttaagaagggatatgattaataaggttgattatatgtttggagtaggttgtgttcgtgtaaaggtatttgattgagaaagtggattcgagtttagattcggtttatgtttttttaattaagtagtgtattttgatatgggtttgtatttatatagaggaatttttgatttgtatagaggtatgttatgggttagcggtagttttggttaattaaaaaagggtatgaagaaggaaaatatggatttggatattgaattttgtaaagtgagatatgggtagtttttgatattgttaggaagtatagttgatttttattttttattattcgtatttgagaatttgtttatttattaaaatgtattggtaattttaaaaggttattaataaagtcgtagtatttttaggattttttgtagatacgtatagtatttaggtgaggttgattaaggagatgttttgttgttttgttttagtttttatatcgtaagtcgtgttatttttatagtatatttattgtcgtgttttttgtatttttgtgttttttattggtgaatttattttttaaaatggtttttaagtattagtgttgtagtgttgtttagtgttttttagtgtaagcgggttatgatgtgttttatgggagaaatatatgtgttaggtaagtttcgtttatgtataagttatattgttgttagttgtgagtttagtgttaatgaattaataatatattttatataaggtgtttttaaatagaaatatatataaagtaaggttttatgttgattagttgatgaaaatgttttgattagaggtttacgggaatttagtttgtattttttttaggaataaattaggtattaattaatttagtatttatggttattttatagaatagaattattaagaataatgaaaattaattgtattttgagatttttatttaaaggatagtaatattatgtattttgtttttgttaagagttggtataggttgaaagtataatgaaggtaaaaatattttttgttattatgttaaatttttgggtgatttgataggttgaatatggtatatagttttgtaatttaaattgtgttttatttagtagtagttgtagtattattgttaagtttgttagaaatataaaattgtaggttttggttttgattagttgaattagaatttgtattttaataaaattttaaggtgaatttttaggtgatttgtatgtatattggagtttgagtttgaaaagggttattatgatggaaattgttagtttgtagtgaagttatggataaggtttttaattttttaaatatgattttatttgtttgtagattaagggattggattggttggattttttttaatttttattagtttttcgttatgtattaggtagtgtgttaggtgtttaggaaagaaggatttatttaataaatatttgttaagtgttttttatgtgttagatattattttggaggtgaggttataaatatggaggtgaggtagaaaagatttttgtttttatgtagtttatattatgatataggaaatagttagtaagtaagtaaatgatttttttaggttataatttttgtttaggtgttgtgaaggaaataaatagggtgatgtgaaaaattgtgggaggggagttagtatattaggttagcgggtggtagagaaagtttttatgaggaagtggtgtttgagattagatttggagataagaaggaataatgtatagttttgagttaagaatattttagtttgtgttttttaagtagttatatttaaaaagtggttgggcgcggtggtttatgtttgtaattttaatattttgagaggttgagataggaagattatttgaggtcgggagtttgagattagtttggttaatagtgaaattttgtttttattaaaaatataaaaaatattagtcgggtgtggtggtttgagtttgtagttttagttatttgggaggttgaggcgtgagaatcgtttgaatttagaaggtatagtgagtcgagattgcgttatcgtattttagtttgggcgatagagcgagattttttttaagatagatatatggatggatggatggacggatggacggatggacggacggacgggcggacggacggacggacggacggacgatagatagttagttagttagttagttatacgtggtttgtggttaggtaggggattagtaagtgtaaaggttgtgaggtggagttagaaaggaggtttttgatttgggggcgttggtgtgttgtgagtgaggaggaaaggtaggtagggttagattataaagggtttgtgtggttacgatggagatatagaagagaattgaaagtatagtggaaagttattggagaattttaagtagaaaggtgttatggttttatttatatttgtatagggattagtttggttgttttgtggagaacgggtaaagagaggaagtaaggtcgggtgcggtggtttatatttgtaattttaatattttgggaggtcgaggtgggtagattacgaggttaggagatcgagattattttggttaatatggtgaaatttcgtttttattaaaaatataaaaaattagttgggcgtggtggtaggtatttgtagttttagttattcgggaggttgaggtagaagaatggtataaattcgggaggcggagtttgtagtgagtcgagatcgcgttattgtattttagtttggatgatagagtgagattttgttttaaaaaaaaaagtaaaagatgagttgggtttttttttagagatgatggattaaataaatgtagttaattttatttttttttaaaattttattaaagttaaaatgattttttttttttttgagatggagtttcgttttgtcgtttaggttggagtgtagtggcgcgatttaaaatgattttttttaaggtaaagatagaggtttgtttaaaggtagtgagttattttaattgattgtttagttagttatagattgaattttttgttttattttttatttattttttattattgtatttgattagttttttttttttttttttttttttttttttttttttttttttttttttttttttttttgagatcgggttttattcggttttttaggttagagtgtagcggtataattttagtttattatagttttaattgtttgggtttaagtaatatttttattttagttttttgagtagtttggtttataaatatatgttattacgtttggttaatttttgtatgttttgtagagacggaattttattatgttgtttaggttggttttaaatttttgggtttaaaggatttttttcgttttagttttttaaaatgttaggattataggcgtgagttattatgtttagttgattaggttttaaaaaaaaaaaagatggagaaaataggaacggaaattagagtattattttggaaattggaagttagtagtaattgattaagtaggtatgatatagttgagtttgaaatttgtaaaagggaaaataatgaaatgatttgaggtttaggagttggtagtatttagtgtttttttagttgtggtagattggttaaataagaggaatatgtgaaaagtatttttttagagttttttattgtttttgggtaatggtttttgttttgttttaatagatatttggaggtttattattttatttatttattttatttatgttttttttgagatagggttttttattttgttgtttaggttggagtgtaggtgtagtggcgtagtttcggtttattgtaatttttgttttttgggtttaaatgattttcgtgttttatttttttaagtaatttttaattgggattataagtgtttattattacgtttaggtaatttttgtatttttttttttttttttagtagagaggggttttattatgtcggttaggttggtttcgaattgttagttttaagtgatttatttattttagttttataatgtgttgggattataggtgtgagttattatatttgttattggaagtttattatttgaagagagtagattagaggatgtgatgggggttggtttagtataggtgaggatttagatagtttattagtaataggggtatgaaatgattataatttttatgaatgttaaatattgagagttaattttaattttaatttttttaattttatttagtttttagaatttttattttttaaaaaagagattagaagattgttttggggaatatgattaatttaaaaagaaataatttaaaattttgaattagatgttttttcgtatatggtttatttagattatcgtagggtgaagtttaaagttagtaagttttatttatatatttagagtttttttttagtgttgagatttttttttttttgagtagatgataaaggagtttgaaattagtttggttaatatggtgaaatttcgtttttattaaaaatataaaaattagttgaaatggtgattgtaattttagttatttaggaggttgaggtaggagaattatttgaattcgggaggtagaggttgtagtgagttgagatcgtgttattttattttagtttgggtaatagagtaagttattatagatttgggagtaattaagaaagttagggatagggtatgtttggtaatttggtaagagttgataaaggggaaaaataaaattttatagaaagaagtagggaagtaagggaaagggattaataagagttaagtagggttaggggtgttggtttatgtttgtaattttagtattttgggaggttaaggtgggtggtttacgaggttaggagatcgagattattttggttaatacggtgaaattttaattttataaaaatataaaaaattagttaggcgtggtggtacgcgtttgtagttttagttattcgggaggttgaggtaggagaattatttgaatttgggaggtagaggttgtagtgagatgagattatgttattgtattttagtttgggtgatagagcgagattttatttttaaaaaaaaaaaaaaaagttaagtatatgtaaatgtggtatgatttattgggagtagaaatattttgagaaaaattatataaaaatgaggttttagattgaaatggtttattaagtgtttaatgtaatgaatgaaaaatatatatattgaaatataatattgtgaaatttaagaatgttgaggataaaaaatatgaaagtttttagagagagagagattttaaagaggtaggttttaaaatgattttagatttttttttttttttttttttttttttttttagagatagggttttgttttgttgtttaatatagtggtataaataaggtttattgtaattttaattttttaggtttaagtgatttttttattttagtttttttagtagttgggattataggggtatattattacgtttagttaatttttaaatttttttttagaggtgagattttgttatattgtataggttggttttgaatttttgggtttaagttatttttttattttagttttttaaagtgttgggattataggtatgagttattgtattaagtttagtttttttttttttttttttttttttgagatggatttttgtttttgttatttaggttggagtgtaatggcgtgattttagttattgtaatttttgttttttgggtttaagcgatttttttattttagttttttaagtagttgggattataggtatgtgttattattgttggttaatttttgtatttttagtagagacggggttttattacgttgattaggttggttatgaatttttgattttaggtgatttgtttattttagttttttaaagtgttgggatgataggtatgagttattatgattggtttaagtttagattttttaaaaagttagaaaattatggaggaatgtttttagaattttgatggaaagttaattttaatatagtagtttgtttttagtttaattggtattaaaatagaagggtagaggtcgggtgtagtggttaacgtttgtaattttagtattttgggaagtcgaagtaggtggattatttgagataaggagtttaagattagtttggttaatgtggtggaattttatttttattaaaaatataaaaattagttgagcgtggtggtaggtatttataattttagatatatgggaggttgaggtaggagaattgtttgaatttgggagatggagattgtagtgagttaagattgcgttattgtattttagtttgggtgttaagagcgaaattttattttaaaaaaaggtagaataaaaattttagagaaagtaagattttagaaaaaatattgtttttatattttttttgaggaagtttttggaggttgagttttattaaaaggtgggtatagataggaaggaaaaagaaatagataaatggttgtttaagggatataggagagaggtgattttgtatatcggtgtagagggtaacgaggttagtttggaacgggtttgaaaatttagggtgaaagatagtatagagtgtcgtttttagagttatgtttttttttggagtgaatagatgggttcgggggaaggtaggaggtaggggaagtattatatgtattgatgagatttataatgatgatggtgtatggttgagtttgagtaatgggataacgaaggtatgtgttttggttgggtgtgatggtatatgtttgtaattttaatattttgggaagtcgaggtaggtggattacgtgagtttaggagtttgagattagtttgggtaatatagaaaattttgtttttataaaaagtataaaaaatagtcgggtgtgttggtttatatttgtagttttagttattttagagggggaggcgggaggattatttgagtttaggtaggttaaggttgtagtgagttatgattacgttattgaatttgggtgatagagtaagatgatgttttaaaaagaaaaaaaaaatgtgttttttgtttggtatttttttttattagtattttgataagagttttttgatttttttatattgtaaggaataagaagatgaaatttaggttgggtgcgatggtttatgtttgtaattttagtattttgggaaattgaggcggatggattatttgagattaggagtttgagattagtttggttaatatggtgaaatttcgtttttattaaaaaaaatataaaaattagttagatatggtagtatatgtttgtagttttagttatttgagaggttgaggtaagagattagtttgaatttgggaggtgaaggttgtattgagttgatcgtgttattgtattttagtttgggtaatagagcgaaattgttttaaaaaaaaagaaagaaatttgtttaaataagaggaattttatgaatatatatatttttgtagatgtttagagtatttttggaaggatatataagaagttggttttggtggtttttttgggaaagggatttaggtggtttggagaatgaggaagaagtttcgtggtttatttttttttttgttaaatttgtattatgtgtaaaagataaaaaagattatttgtttttatttttataaaaaataagttagttattgtagtagtttaggttagtattaaggttatcgtagtaatagtggggggatttgagtaagattggagatagtagaaagttaatatgtgtttagtgtttttaaggtatttatattttagaagggggtatacgtgggaaaaatagattaaacgggggtttattagagaaatattggattttattggattggttaagtagataggagggaatttatttttatgtatttgtttttttttttttttttttttttttggagatggagttttattttgttgtttagggtggagtgtagtggcgtgattttagtttattgtaattttcgttttttaggtttaagtaatttttttgttttagtttttcgggtggttgggattataggtattcgttattatatttggttaattttttgtattttagtagagatagggttttattatgttggttaggttggtttcgagtttttgaatttaggtaatttattttttttggttttttaaagcgttaggattataggcgtgagttatcgcgttcggttatcggtttttatttttatattttattttggagttttggttttcgggtatttgttttttatttttgatttagagcgtgaatttgattttatttttttatttaggtggttaagattaagtagtagattgaggagtagcgggtgtaggtgtaggtggtggagcgggtttagtaggtggtagtgtaggagtaggagatcgttcggcgggagaaggagttggaggttcgggtgcggaagttagcggaagcggagcgttataagttggagcgtttagtcgaggtagagaagtaaatgttttttttttgattttgtttagtttatttgttatttaggtattttaagatggagtgttgaagtttttattatttggatttttatggattttaggttttaggagcgtttgtttttgtagtattgggttttttttttgggagtaagggttgttgggttttattttttattttttttttgtttataggttttaattaattatgtaggcggaggtagaagtcgcgtttgtgcgggtgagttaagaggtagttttatgttggtttgtggagagggtgggggttgttgtttgatcggggattttttgtttttaatgattttcgttaattttataagtatttttaatttttagatgcgtggggaagttgaggtttttgttataggggttcgagttcgagtcgaggttgagtagatggttaagaaggtagaagttttttagttgtattaagaggttgtttagttggatatgttgttagagaagttgttttaggtttggaggttatgtgggtattaagaaaggaggaaatagaattagggattaaggggtggggtgtagtgaggggtttagggagaaatagtttagggggattttaaattaggggtgggaattattagtgattaaagtgaggaaggatgattagtggaacgaggattttaaaatttagagtaagttgttttatgaggaatgtggttagattatgggtattgagtgggtgttttttttttgttaggtggtagaggagattagtggttttttgattttagttaataagattatattggtgtttagcggtagtgggattatgggggtagttaaagtgattggggaagtattggatattttaattcgtttgttagagagtgtggaaagatttataggcgtgagtattttttaggtgaggttttaggttggagttgaggagaattgttaggtttttgtgttgtgtgatatagtatgtttagtatttaattagtatttaggtttgggagttattgatgtttattaattattttttgtgtgttagatatagtgttaagtttttatataaatgagttgttttaaattaaattattattagggtatataggattttataaagtttagaaatttaatatttagtatgtttttatttattttgttagtgtagttggagtgaaatttaggtcgattgtttttgtaatttgtgtttgtggttattttattagtatagggaattagttgtagtttattgatagttaattaattttagggtatattattgttttttttagcgttttagttaatttatttgtagattatggtagaagttagtaaataggttttggaattattgttttgttgcgaattttagttataatgtttgttagttgtaattttggataagtaattaatttttttatatttgtttttttattttaaaattgggttaataattagaaattattttgttgaattgttgaggggttcgagtaaatatttgtagtgtttagaatagtgtttggtatatagtaagtattatgtgtatgttaaagaaatggggttaggtgtagtggtttacgtttgtaattttagtattttgggaggttgaggtaggtagattatttgaggttaggagttggagattagtttggttaatatggtgaaatattatttttattaaaaatataaaaaaaaattagttaggtttggtggtgtatgtttgtaattttagttattcgggaagttgaggtaggagaattgttggaatttaggagtcgaaggttgtagtgagttgagattatattattgtattttagtttgggtgatagaataagattttattttaaaaaaaaaaaaaaattttaggcgcggtagtttatgtttgtaattttagtattttgggaggttgaggcgggcggattacgaggttaggagattgagattattttggttaatatagtgaaatttcgtttttattaaaaatataaaatagtcgggcgtggcggtgtgtgtttgtagttttagttgttggggaggttgaggtaggagaatggtgtgaatttgggaggtagagtttgtagtgagtcgagatagtattattgtattttattttaggtaatagagtaagattttgttttaaaaaaaaaaagagaaagaaatgtatattcgggttgggtgttgtggtttatatttgtaattttagaattttgggaggttagggtggacgattagttgaggttagaagtttgagattattttggttaatatggtgatattttatttttattaaaaatataaaaattagttgggtatggtggcgtatatttgtaattttagttattcgggaggttgaggtaggagaattatttgaatttaggaggcggaggttgtagtaagttaagatcgtattattgtattttagtttgggtgatagagtgagatttcgttttaaaaaaaaaaagaaaaaaaaaaagcgtatgtaaataaaagtattggattatattaatgatttttaagttgggttttttggagttttttggaggtttgtagtagaatatttagagttaaggagagtgtgtaaataaggttttgtttttttttttttttttagtgatttattgtatgtgggttttgatgtttttgtttggggaaataggtggtagggtattagaaagaattttggtcgtgtgtgttttgtttatagtttattcgtttaaattggggttcgggagagtaggggttttagtttttcgaatgtttttaagtgttatttattgttgtttttttgttaggtgaattataagtttttgagaatagtttgagtttttagtttttatagatgtttagttttatagttgaagttgtttgaatgatttttttgttgtatgtaatttattggtttttttgagtatgtttattgatagtgaggttttattttttatttttttttgttaaatagtttgtgttttgttttgaagggggttgttttttttgttaattttatattgttatgattgttaattttagcggttttatgttagttttttgatgattttattttattttattttaatttatttaattttttaattaaattagattgtttgagtttgttgtttagaatatttttttgattaagattgagggatgggttggaggtttttaattttgttatttaaataaattgttgtaagtaagtattaataaaatagaagtaattggaaattaatgtttggttcggtatagtggtttatgtttgtaattttagtattttgggaggttaaggtaggtagattatttgaggttaggagtttaagattagtttggttaatatgacgaaattttgtttttattaaaaatataaaaattagttaggtagggtgaaatatgttaagtagtagttttagttatttgggaggttgaggtaggagaattatttgaatttgggaagtagaggttgtagtgagttaagatcgtattattgtattttagtttaggtgatagagtgagattgttttaaaaaaaaagagaaaaaaaatgaatgttagatttaggtatggtgatttttgtttatagttttagttatttgggaggttaaggtgggaggattatttgagtttaggagtttaaggttgtagtgagttatgattatattattgtattttagtttgggtgataaagtaagattttggttttattagaaagaaaatgaatgttagaatgtagtttttttttttgtatataataggtttttttgtatataataggttttttagaatgggagaaaagtaagttatttatatattgttaagagttttagagttaatttttttttttaatagtgtattatagttagaaaagtatgttaaaatagaaggaatgttgggaataatattagtttttagaatttttgaaaatatggtaaaaggaattattgtttttagggtagttttgagatttgtattgtgaatttaaaagtatgaggtagtagatggtatagattgttttagaatgggattataaggtagtaatttcgtttagttatttttttttttttttaaagataaggttttgggtttgggtcgggtacggtggtttatgtttgtagttttagaattttttgggaggttgagacgggtggattatttgaggttaggagtttgagattagttttggttaacgtggtgaaattttatttttattaaaatataaaaattagttcggcgtgatggtgggtgtttgtaattttagttatttgggaagttgaggtagaattttttgaattcgggaggtagaggttgtagcgagttaagatcgcgttaatgtgttttaatttgggtaatatagtaagattttattttaagaaaaaagaaaaaaaaagataaggttttgttttgttatttaggttggggtgtaggggtagggttagggtttattgtagtttttattttttaggtttaggtaatttttttatttaatttttatttttttatttttaataattattatttttttttattttagtagttgggattataggtatgtattattatgtttagtttttttttttgttagatggtttattgttgtttaggttggtgtggaatttttgggtttaagttatttttttgtttcggttttttagagtgttgggattataagtgggagttattatattagggttttattagttattttggtgttataggttgattaagtttataggattataggaaatggttatgggtatatataatttaaaggaattttgggttgggtggttaaggttagtttaattatttatggtttagtatatttgggtgggatgaaaaatttgtatttatttttgtaagtttttagaggatgtggatgttggtttggaaattagttatacgtgatttgttattttttttagtttttattttttatttttggattttgtatttaagtttatgttttttttagttaagatttattggtgggtttggtgtattggtttatttggtttatgtttatagttttagttgtttgggagaatgagatggattgtttgagtttaggatattaaggttgtagtgagttgttagagattatagtaaagattgattggtgtttagagtagtttgggtattagaaataatgatgtgagggtttataaagtagttagtgtttttattagtatttttttgagatattaaatcggtagatatttaagttttttatataaaatgtagtatttgtatataatttgtgtattttaaattatttttacgttatttgtaatatttaatttaatgtaaatattatgtaaataatttatattattattgtttagggaataatgagaagtttatatatgtttagtataattttttttttaatatttagttggttgaattcgtaggatagggatttaatattaagtgttaatttaaggagagtagtgtaattgaatttaggttttatgtttttattagttagtcgtgtttttttaaataagtatatatttcgtagttttttttaatttttatttatttttggtttttggggcgatgttatttttttaatatgaaaaaaagtagtaagtttaatataaaatagaaattttaaatgtaggatagaataaaattaagtgtgtgaggggggaagtaatagtaaaaggaagaaatgagatgttgtaaaaaagatggaggagggttttttttttttttggggattgatttaaatattgatgtggtagtatatattattttagagttaggggtgtttatttttttttgggagtaagaaaaggtggggattaagaagacgtttttggaggtttagggattaaggttggtttttttttttttttttaatttttttgatttttttttttgattaggggaaaggagttgagtgagggaggtagagttggaaagggaaggattttatttgatagagtgggatagatttttttagagtagagtttggagggagattgaaagtggagataatattgttgatattttttttgaagttgagatgggaaatggatatatttagaaatttagtgattttaatagtttggatttttttttttaaaatttttagaatggaaaattttatttttttttttatatagtgatttttatttattattttttattattttttattttgggtttaggatgatggttattatttatatgtgtttttagtatttggttggttttaaatgggatttggagatttagttttttggagatttttaagaggaagtattaattggataaatggaatgggtattagaaagaaatatagggttatttagaatggtagaaatttaggttttttagagtggaaagagagaggagatatttaataaataagtatttattgagcgtttattatgtgttaggtattgttttagattttttttagaagaaaaaataaaaaataagatagaggtagtaaatataaattttgagggagaggaaaggggtagttgagtaagacggttaagggaattgagaagtttgaggtgatgggggttttgttttaggtttttttttcggtttttttatcgaaatttttttttttttttgcggtggtattttggtattgttgatatttagagacgaggtcgtttatgttgtttttagtttcggtgaattttatttcgtttatgttttcgtttgtgtattagtggaggaaggtttttcggcggaatatggtagtgaattgtttcgagatgcgtttgaagagtttttggatggttgtgttattgttaatgaaggtgattgttattttgaggttacgaggtgggatgttatagacggttgttttgatattgttggggatttattttataaagtagttgttgtttttgttttgtacgttaagtatttgtttatcgattttttttatggatattcgattacggaagatagtagttacggtgaggtatcggtcgtggcgggggttataggtagttattatgtttttggtatcgaagatttgttgggtgagtttcggtattgtgagagttcgatattgttggtttttacggttggtgagaggggtaaagttaggtataaagaaatggagacgtgggaaggggattatgttgattgttaatttgcggaggttagtattgagttggttagggaaacggaggtaggtggtgatattatttatggtggttgagataaggtggtttagattttcgtaggttggtgtggttagttttagagtgcggaagtagatattatagagggtttcgttgttaatgtaataggttttattagtattttttattaattgatggacggagagggtggtattgtagggttcgattacggtgttagatattttgggtgaaggtattatattgaaggtatttatgatgcgattagggtatttttttcggattttgttgataaggagagtgtttattttagagtttgtgttttcgtttagtgagtgggttagttggaagttttgtaggtagttatagttttttgttttttttcgtattatatttaggatagaattaattagttcggcgttttttgtgtagtggtttttggtttagttgttatttgttttagattgatttggaatgtagttaggagaaaagtttaattaatagggtatggaagatatatgatgtttttattttttaattttttaaataattttttcggatgtatttttttttttttttattgtgatatattttttttttattgttttataatttattagtaatagtaggtattatttttatttttcgttagattttagaatatatttttgtattagtattttaatataataattattttttaatttttgttgtgtttttgtatttaaataagttgaatacgatggtatattatttgttaatattatttgtataatttattaaatataaagttgtttggtttaaagatttggttaaaaggatttgagcgaatagagtttatggttttaggttttagatttattaggatggtacgaggaatatatttgttatttatagagaataaagttaagagttgtgaaatttggtagaagggaaggtttatagatatattggaaatgggagatagtagggattagagatttgttattttaggtttcgttattaggtggtagtagacgtttttggtttcgacggtggtttacgaaagggataaaatgatagatttatttaaaggggataaggcgtgtttagaaatggaaagagattttagataagtgggagatagggaagggaatttgagttgttcgggtttttgtttttatttgtggttttattgtagtatatagagatgcggtttagttgtaggtcgttgttttcgtggtaggtgtcggtggggtcgatgttatgtttattattgattattttttagaattgtcgagggggagtaacgagattataataggttaagttttagttaattatgtttttaattattattttattttattttttttttaattttttttgagacggagtttcgttttgttattaggttggagtgtagtggcgttatttcggtttattgtaatttttgtttttcgggtttaagcgatttttttgttttagttttcggagtagttgggattataggcgcgtattaatacgtttagttattttttgtatttttagtagagacgggttttattatgttggttaggatggtttagattttttgatttcgtgattcgtttattttggttttttaaagtgttgggattataagggtgagttatcgcgtttagttttttttaatttttaagatagggtttttttgttgtttagtttgtagtgtagtggtgtaattacggatgattatagcgtggaatttttaggtttaatcgatttttttattttagtttttcgagtagttgggattatagacgcgcgttattacgtttagttaattttttatttttattttttgtagaaacgtggtatgggggagggtttcgttttgttgtttaggatggtttcgaatttttgatttggagggattttaattcgtttatttcggttttatattttttattttaattttataagcgtttaggtcgttgttttagggtatggtatttcgtgggtttgttatattttttttttagatattcgttttttcgagaaagttatagttttttttgttttggatatgtgtagcgggttttaagtgttcggtgggcggatggaggtcgattatatttcgataagcgtcgtttttttttttttaagttgggtatcgttttatcgcgcggcgtataaaaggttgggggtttgaggaaagagttgtcgtcgtagtcgattatttttttcgttttttacgtgattgcggcgtacgcgtaggtcgagtcgtcgataaaagatttcgcgcgtgggcggggttagggataaaaatttcgcgcgcgaggggcggggtttaaggtagcgcgtttttgtcggcgggtaacgtcgtattgttttcgcgcgtttacggcgtttcggtttcgtttcgtagggtttcgtttttttgttataacgtagtagtcgtattttttttcgtttttttttcgttatattgtaatcgcgcgtaaaaaaaaaaaattttttttggtttcggaatttttattttttcgttatatttttattttttgatttaaaggatttttttttttttattaagttttgagggatttattaaagaaaattatatatttttattttttcgatatatttgtttacgttttaaaaaagttttttttaggggttatgaaagtaagtaaaattaatttcgtttttattttttttttatttaggaataaatataggatcggttttttggggtcgcgggcgcgttggggtttttggttttttgtgaaaggtagcgtttagcgtagtttattttggcgtatcgttttttatttttgcgttggagttttttgtagtcgttcgatggttttattttttttcgtttcggtttggttttaagtatttcgtaggggggttgggcgggatgtatatgggtaaaatttcgtttcgttttgtttgcgatcgttttcgtatttttttttttgttcggttttcggatcgttagaagtttttttaagtaatattttataagttttcggttttttcgtttttaaattcgaagagtttttttattagtttttttaaaatgtgtttgttaagaaaaatgatttttagttttttaaaggtaaatgttagttataattgttatatatataaatgtaataaatttgagaggggtaaattttgattaaggatagcgggtgtaaatgttttataattatttttttataatttatttggatttttttttgtaaaaagaaataaaagaggtgtaaaatttttattttggtatcgatttggttgttatattgattagtttggatgtgtacgattttttttatggttaaaatttaatttttttgttcgttttaaggtatgtatggggtaagaaaataagtaatttttttttttcgtaggtcgtaggttggaaggttggaatgcgttttagaggttggagtagcgaggtgtaaacgcgacggtaggaaggttttgagagggagaaaggagaggggagggcgcggagggaaagtaggttgggcggggcgcgcgtgcgtcggggttgggaggcgggagaatcggtttcgcgcgcggtagggagataaagttttatcgagtttggttttgattagtcgatgtcggttatgtattaggcgtttattggtttttgagttagtggacgagcgtagttttttttgggagttgtagttttttattgttgtttatgttgtaaaatgaagtgacgaatgggtgggtatcggtttggtttttatggggtttttgttttgtaaatgaaaaacgattttgcgtaagattttttttttttatgtttgaggtttttgtataaaaagtgagtagtttttgggggtataggaattgagaagtttggggttttagaagttgggtggtggggaagatacgttttgaaagtttttagttgtagtatttttaggggagaaaggattgtttagtttagcgaaaaatggggagaagtttggtatcgtgttttgttttttttggtttttggtgatttaaggtatgaattttagtaagtttttgtttttttaaatattttaagaagggaatcgtttttttgttatttttttggaaattttcgagttattgttttgaaagagaaataaaattgtagtaagggttttttaggatagcgatgttgtttggagagtatgtttaaagaataaaatagtttagagaaatcgatatcggggatttgtgaaattagaagttttttacgtgggtaggagatttggattttagggtagattttgaagatattttggtttttttgttaaatagggaattatggaatgagatgtttgatagatttttagtttttttagtttgtttttttagatatgttaatgaagttagtggttttttaattcgttgattttattgattaggtggtcgttattgtaattttgtaagagatttagtattgaaaaacgagagaggggtaattgatgggggaaaaattgagtgggtttaagacggagtttatttgtttttttttatagatttattatttatttatttgatagttattatgtatttattaaattaggagttatggttataaaatgattaagaattagttttttgttttttaggatgttgtagtttggtgagaagtatataattaataaaatgtggtaattatttagaaatgtagtattaagttaacgttattgttaatttatattcgattatatagattaatgtattttttttttttttttttgtatttttagtagagatagggttttattgtgttagttaggatggtttcgatttttttatttcgtgattcgttcgtttttgttttttaaagtgttgggattataggcgtgagtatcgcgttgggtagattaatgtatttttaagttgttttttaaatgagggaatattaatttgtgtaagttttttttatttatttaaaatataatgttttacgttttagggaaatgaatatagttattttgtgggagtagaaataatttaaaatatataattagataatttgttttaatttgtttttatattagttgtaggattttaggaaagttttttaattttgtagggttttagtttttcgtttgtaaaatttgtttatttgattgttgtgtatagaattgagataattaatagaaaggattttatgaattatgtaagtgttatagttattattttttttatgttttattgtgagataaaataggtcgggcgtagtggtttacgtttgtaattttagtatattgggaggtttaggcgggagaattatttgaggttcggagtttgagattagattgattaatatggagaaatttcgtttttattaaaaatataaaattagtcgggcgtggtagcgtatgtttgtaattttagttattcgggaggttgagataggagaattgtttgaatttagaaggcggaggttgcggtgagtcgagatcgcgttattgtattttagtttaggtaataagagcgaaagttcgttttaaaaaataaaatatagatggtcgtatgcggtggtttacgtttgtaattttattattttgagaggtcgaggcgggcggattatttgaggttagaagttcgagattagtttgattaatatggagaaattacgtttttattaaaaatataaaaataagttgggcgtggtggcgtatgtttgtaattttagttatttgggaggttgaggtaggagaatcgtttgaatttgggaggtagaggttgcggtgagtcgagatcgcgttattgtattttagtttgggtaataagagtaaaattttattttaaaaaatagataaattagttaattaaaaaataaaaataaatgattttatgatttttttttcgtttttcgaaaggtggggatagtttttaagatagagagtaaattagttttttttgttcgattatagatttttaggattttggatttaagaaaatgattttaaaatgttcgttagagacgtatttttaggaagaaagatattatttttattataaattaaattaaaaggaaatgaaattttaatgtaataggagtgaattgttacgtttacgggttgttttttaaattgtagtttttagttacgattgtaacgcgtaatttatttttattttttatgagttagcggatattatgtttaggaggatcgaggaaaggcgttttggttttattagatacgtcggacgtttatgatatagtttttttattcgttgtcggtagttggcgttagattttttggtcgcggtttggaattgcgcgggaagtgggtggtgggcgggtaagcggtagtgggttgttttttggagttgtttaatcgacgtgtattattttgttggcgtacggcggtttttaattatcgttttattaattgattttagtagtttgggagatattatttatttgaattttaagggggcggggttttgggtgtgttttcgttcgattggttgcggttgtgaaagatagcggtagaagttaattagtaaataagttttttttcggtatacgtagtcgttttattcgggtcgcgatcgttattggtggcgcgcgcggggatttaaagtaggtgagttttaggggtttggtttacggtttttcgggagttattttggtttttttagaaggcgggaggggcgtattttgggtgcgattgggcggaggtgatttggaagttcgtttttcggattgtaatatttatttttatttggcgtttcgtttcgagtttaggtatgaagatatagggagacgtcgggttataagggaatttattgaggtggggattaaagatggtggttttttgaattggagttaagcgtggtgggtattcgttgagttggtttgttataaagacggagttgatattttatttatggggtattttattttttttatttgttaatagtttttttttagagtggtatatttttaggtgaattttatttatgttattttttttttattttatttgtttttttattagtaggttcggtgatgagttttttcgagggtagggtcgattttatgtttggtttatagatgtatattaaatattttaaataggtatattataattattgaatgaatatgatggattttaggggaaagatacggtttttttaatttagttttggaggtgggtgagtgtgaaggtagaaatggaaagtaatggttataatatagcgagagattttagagtaagtataaatttattgattattgtggaataggtaggatatattaggaatacgagaaggtagggaatacgttaggaaagggtttgttgagaaagtgatatttgaggtcgggcgcggttgtttattgttgtaattttaatattttgggtggttaaggtgggcggattatttgaggttaggagttcgagatcgtggtgaaatttcgtttttattaaaaatataaaaattagttaggcgtgatgtcgggcgtttgtaattttagttgttcgggaggttgaggtaggagaatcgtttgaagtttggaggtagaggttgtagtgagttaagatagtattattgtagtttagtttggacgatagagcgagattttattttaaaaaaaaaaaaaagaaagaaagtgatatttgaattgaattttaaaggatggtagaagttggattagaaaattaggtgggaaaaagttaaggaattgggttaaggtatgaagatgtgggaagataagaatagtgtgttcgaagattggggaaaatgtttggttgaattataggtttttgcgggcgaggggtaggcgttataagatgtgaagtttagattatggagggtttcgttaaggagtttagattttattttgtgtgtacgaaaaattattaagattttagaggagagatatttgagtgatttggggtaagttttaattttatatatgtttatgtatgttttaaggagatttgaaaattttaatttagttatgttgtagtttttttatttgaagaaatggaagatagtaatattattttataaggtttttgtgaagattaaatgagttagagtcgatataaagtaattagaatagtgtttgatatataggaagtttttatatatgttattttttattattattttttgtagttgtatttgattaaattgaggtggtttggtaaaagtataaaaagtatgggttaaaaaagaaagaaaaataacggggcgtagtggtttacgtttgtaattttagtattttgggaggttaaggtgggcggattatttaaggttaagagttcgagtttattttggttaatatggtaaaattttattttttttaaaaatataaaaattagttaggtatggtggtaggtgtttgtaattttagttatttgggaggttgaggtgagagaattgtttgaaattcgggaggtagaggttgtcgtgggtttaagattttattattgtatgttagtttggggagtagaacgagattttattataaaaaagaaaaaaatgttttaagtgttttagaaggttaataatagaaagattggtggaaagagaagtattaacgtttataatgatttagtttattttttagtttttagtttgataattttgatgttgtttgtgtgaattaataatgaggataattgataatgtgtattttttttagattatggaggatatttaggttattgattgggatgttgaagaagaggaggagatagagtaatttagtgaatttttgaggtgtaacgtggagttagtagggcggttatatatttttagtggtgtttatggattagaaaaaggttagagggtattggatgtttaagtattgatatagattttttatttttgtggtaaggtatttggagggttgtaagaagtttatgtatgttttaatgagatgtgaattttttttttttatgaatggaagagatggggtcgattgagttgatagttgtagattattattttggatttattggaagtgattttattttgataaaagaaaattaagagattgaaatgaagttgggtgtagtgatttatatttgtaattttcgtgttttgagaggttaaggtagaaggattatttgagattaggagttagagattagtttgggtagtatagtaaaattttgtttttacgaaaaatttaaaaattagttaggtgtggtggtttattttatatttgtagttttatttatttgggaggttgagttagatgattatttgaatttaagagtttaagattgtattgatttatgattatgatattgtattttagtttgggtgatagaatgagattttgttttaaaaaaaaaaaaaaaattaaataaaatttaattgtgtgttttggagatggatggtagtgatgattgtataatagtgtgaatgtatttaatgttattgaattatatatttaaaattattaaggtgatatattttgtgttatgtgtattttataatagtaaaaaaatatttattgtggatggatggggtatcgtatatatttttttagtgtttagatgttttagggttttttatttttttaatgtatatggaggttttgagtgagtagtagagtatttaataggtatttttttttaatgataggttaggattttgattttggagtttatttatttttttaatttttagattttttattatatttcgggaagaatgtggtaggtcgaatgtttgattgttttgtggttttgttttttttatttatttttaaataatatgtagagattgaaattttagtttgggataaggtatttatttttcgagattgtgggagttttaatggtatttaaattttgagattttttaaggttttgagttttggggtgagttatcgtttgagggattaggaattgattttttttgttgatttgttttgttagtattatcgtttggatgtttttttgttttttgtttttcggggttttttgatagtagaagagatatttagagtatagggagaaatttaattttagaggtttttgttggttgaggattcggaggaggaagtaggtaagtttgtatattggtagggagaatgaggagataggaataatgagtgtataattgttaatttatttttttttgtttttgatagattttttttttgaaaggcgtatggtaaaaaaattaaggattatatttttttttgtgatagttttagagaggtgagtgttaaagagttagatatttgagtttttaaaatgaggaagaattaggggttggaggattaatttttaaaagagatgattattatgagagttggggttggggaattatatatatttatttatttagttgaatttttatggagtatatttgatgtgttaagtggaaaataaattggaaatagaagaagaaatatgttattttgtgtttttttttaaggagtttatagttgagttggggtattttttttagggaaataaattttatagattttttttttttttttttatagtgatgaagaggggtatttttcggttttgggcggttttgggtcgttttttgtttttaatttgaatagtgatatagatgtggaagaaggttagtaattagttatagaggaggtttttttagttgttagaagaggtgttattgtagaggtaaagtagtttgaagttaaagttgtaattgaaatttagtttgaaaaggattagtttttagtgaaggagagggataatgatataaaagttaagaggggtgtagggaatggggtggttttagttggggtgattttggagaggagttaattttttggagaggatagtgatatagatgtggatgatgatagtaggttttttggaaggttagttgaggtttatttggaaagggtttagttttttggttttatcgatagcgatattgatgcggaagaagagaggattttagtaattttagttgttatttttatgaagaagaggaagattttttatggagtaggtataaggggttttggagtattaggtttggtttatttgtaggagagttaggttggtagtgatatagatgtggaagaaggtaaggttttataggttgtttttttggagaaaagttaagtttttatggttattaatagcgatatagatgacgaggaagaagttttagtagcgttgattttggtatatttgaaagagagttagtttgttatatggaatagagatgtagaagaggatatgttttaacgtgtggtttttttgtagcgaagttaaattattattgagagagatagtgatatagacgtggaggaggaagagtttttagtggaaaatagagaagttgtttttaaggattatataaagattagagtttttgttagagtatatttagaaaaggattaatttttttttggggatagtgatgatagtgtggaagtagataagagtttatttgggatttatttggagagaagttaagtttttattatagtggatattaatatataagtggagaaggaagtttcgttagggttagttattatatatataaagaagtattaggtgtttgtggaggggataaattaaatagatgtgaaagtagttgggggattagtaaagttgtttgtggtatttttagaggaagtttggtttttgtatggggattgtgaaatagatgtagaggagggtatcgttttaatagttttagtagttgtagatgtaagaaagagttagtttttagtagaaggggatgttggggtagagtgggttgtagttgtttttaagtaggagagagtttatgaggtgggggtttagggtgggttatttgtggtataagtggagtaggatttttttattttaagagagaattttatagatttggtggtggatatagatattttaggggaatttatttagttatagagagagggagtttaggtttttataggaagggagagagaataatatgtgggtgggattaaggattttgaagataattatggtggtaagtgttggttttttttttttgatttttgaaattaattagggttttaatagttggggttggggagagaaaggtagagattatttaaggagtttagtgttaggtatgatttttgttttaaattgttttatattttttttcgattagattttgaagatttggatttataagttatttagtgttttttggagaattagggtttggaaggtgaggatttttgtgttatttgaattttgtattagtgggagttgggagattagattggtggtttttgaagggtaaaggttagtatgggtagggtaggagattaggaatggaattttatagtagtatggaggagatgaatttaggttatttttttttgtatagtagtttagagtatggaggatgaatttatttaggtttttatgttgattttattttaagagtttggttttttttattgtagtttttagataataggtataagaaattttttttttttttgtgtttttaattttgtattttttttttttttttttgttatttaggttggattatagtggtgtagtttcggtttattgtaattttcgttttttaggcggtttttttttttttagttttttaggtagttgggattatagttgtttatgattatgtttggttaattttttgtatgtttagtagagatagggttttattatgttggttaggttggttataaattttcgattttaagtgattcgtttgtttcggttttttaaaatgttggaattgtaggcgtaagttattgcgttcggtttgcgtttttttttgatttgtttttttatatgttttttttatattttgattatagtgagttttttgtgtatgcgagtttgcgttcgtgaatttaattagttgtaggttgaaaatatttagggattggtttgggtaatagagagagatttggtttttataaaaatgaaaaaattagtttagtatagtagtgagtatttgtagttttagttatatgggaggttaggatgggaagattagttgagtttagtttgggtaatagtttattttttaatttttatttttaatgttttttaaaaaaaatatatatatattattgtagtattgtttataataggtagatatgaaattaaattaaatgtttattaatagatgaatggataaagaaaatgtaggtcggggtcgggtatagtggtttatatttttaattttaatattttgggaggttaaggtaggtagattatttgagatcgggagtttgagattagtttgattaacgtggagaaatttcgtttttattaaaaatataaaattagtcgggtgtggtggtgtatgtttgtaattttagttatttaggagattgagttaggagaattttttgaatttaggaggtagaggttgtagtgagttgagattgtgttatcgtattttggtttgggtaataagagtgaaattttgttttaaaaaaacgaaagaaaagaaaatgtaggtcgggtatagtgttttatgtttgtaattttagtattttgggaagtcgaagtgggtggattatatgaggttaggagtttgagattagtttggttaatatggtgaaattttgtttttattaaaaatataaaaattagttgggtatggtggtaggtgtttgtagttttagttattcgggagattgaagtaggagatttatttgaattttagaggtagaggttgtagtgagttaaggttatattattgtattttaatatgggtaatagagtgagattttatttttaataataaaaaaaaagaaaatgtgtatataggttgggtgtagtggtttaaaatataaaatttagttgggtatggtggtatgtatttgtagttttagttattcgggaggttaagatgggaggattgttgtttaagacgtagaggttgtagtgagttgaggttatgttattgtattttaaattgggtgatagagtaagatttaatttaaaaaaaaaagaaaatgtgtatatatatatagtggaatagtatttagtaatagaagagaatgaaattttgttatttgtagtaatatggatgaattttgaggatattatgttaagtgaaataagttagtatagaaaggtaaatattgtatgtttatttatgtgggagttaaaaatatggattttatggaagtagagagtagaatggtggttattaaaggttaggaagggtagagggatagaatgtataaagaggttggttaatgaatataaaaatttagttagattgaatgaataagttttagtgtttagttttatagtagtgttattatagttaataatttattgtgtattttaaaatagttagaagagatttgatatgtttttaagataaagaaatgataaatgtttgagatagtggatattttaattattttggttttattattgtatattgtatgtatgagttaaaatagtataggtattttataaatatgtataattattatgtgttaatgaagaaaaaagaaaatgtggtatatatatatagtggaatattatttagtttttaaaaagaaggaaattttagttaagtatggtggtttatatttgtaattttagtattttgggagattaatgtgggtggattatttgagtttaagagtttaagattaaattttatttttataataaatataaaaaattagtcgggtattttggtatatgtcgtagttttagttatttgggaggttgaggtgggaggattttttgagtttagtagttgcgagttgtagtgagttaatattatgttattgtattttagtttgggtgatagagtgaaattgttttgagagagagagattatttagggaatttttttattaggttatgatgttttttttttttttttttttttttttttttttttagatagggtttttgttatttaggttggaatgtagtggtatgatgagagattatttagggaatttatattaggttatgatgttttttttttttttttgggtttttttttttttttttttttgagatagagtttttgttatttaggttgaagtgtagtggtatgattatagtttattatagttttgatttttggggtttaagtagtttttttattttagtttttcgggtagttgagattataggattataggttttcgtttttatatttaatttttttgtattttttgtagagatggggttttgttatgttgtttaggttagttttaaatttttggttttaagtaatttttatgttttggttttttaaagttttgggattatatgtttgagttattatgttcgtttaaggttatgatttttttgagataaacgttaaatgttataattattatttttatttttagtttatttttaataatttgtttagatttattatttatgagtttatttaaatttttttttattatatttattatgttaatttgtattttttttttttttttttttttttttttttttttttttttttttttttttttttttttttttttttttttaggtattttagatgaattatgggaggttttggttatatagttattttgtttgagagagtttgaggattttgagatttagttttttgatacgtattttgaggtttatggattttgtttgtttttatttagggtaatattaggagattaatatttagagagtttagtttatatagagttaatggggatttaaggtagagggaggtagattgtggataaagttatgggtatattaaaagaaatagtagagagggtgggttttgagagagggttattggagagagaaattgagaaattgttattagaaagatagatagatgtgataggagaggaagaattaattaaggggaaataggatagagaataaaaatagttgttagttagagatatttagagataagaatttgataaaaatggggaaagtgtaagttttgaaagagatagggagagtttgaaggtagaaattgagatatttgaggaaatataagagaaataagtatagaagtagatttttttaagtaaagtatttgagagagaagtagagagattagtagtaaatagagagtgcgatttagtcgagttagaagagaaggtgtttaaagtgattttggagagagatatatagagaggggagttagagggagggagttaggattagaaagggtaggtttttagtttaatattagagtttggggtgggggcgggggatttttcgggatttattttagttttcgtattttttgggagttagttaggtggaaggggatttttagtgagttttaggaggtattagaaaggtaagtgaaggtagaggggaatttaaggtgatatataggtttcgtgataattaatttttgggtaattagttgtttggaatttagttatttttgtgtttattttttgtttaggttttttgaattgtaagatgttatttgttgagaaggtttttaggattagagttgttgagaaggtttttagggtgagagttattttttttattttttattttataagttatttttatattttttttaatgtttttttatttagttttattttaatttattttttttttattatttagtttttttttatttttgttacgttttgattggtttttatttttttattttcggtattcgttgttttttatatttgttttttaagttgtattttttatttgatttaaaagaaagatttttcgtgttttttttttttttgttttagttatttttttttttattattatttacgtgtggagaatattatagtagtattatggagataggtttgtgggaaaaaggtagttttttaggtagattttagtttaatggaggagagattatagatagaaaggaaaatttagtgagtatattttttgtttttgtttttttttgagatagagtttgtttttgttatttaggttggagtgtgtagtggcgtgattttagtttattgtaattttcgttttttgggtttaaataatttttttgtcgtagttttttaagtagttgggattataggcgtatgttattcggttaatttttgtgtatttttttgttttttttgagatagttttattttgttatttaggttggagtgtagtggcgcgattttggtttattgtaatttttgtttttcgggtttaagcgattttttttttttagttttttaggtagttgggattattaggcgtttgttaatatatttagttaatttttttttttttttttttttttttggatagagttttgttttgttttttaggttggagtgtagtggcgttatttcggtttattgtaagtttcgtttttcgagtttacgttatttttttgttttagttttttaagtagttgggattataggcgttcgttattacgttcggttaattttttgtattttttagtagagacggggttttatcgtgttagttaggatggtttcggttttttgattttgtgatttattcgtttcggttttttaaagtgttgggattataggtattagttattatgtttggtttttttttttgtatttttagtagagacggggttttattatgttggttaggttggttttgaatttttgatttcgtgattcgttcgttttagttttttaaagtgttgggattatagtcgtgagttattacgttcggtggaaatttggtaagtttatttaattataaataagtattaagaatagtatttaagttttattttttttttttatttttttttttttatttgtttttgtttttttttagggcgattaggaatttttagatgtttgtttgttttttatagtatttgaagttttagttttattttaaaagttttttaatttttagagttagaaatattttgtattttcgttttttttttttttttttttattttttattaagttaatcgttcgtaagattaggtaagatgggagttaggaagttttagaggtttttttgtttttagagttggagtttttttatttaaagtttaaaattagaattcggaagttttttagaatgatattttttttagttatttttgttgtttttgagttttatttttttatttttatagtttagttagttatttttaagtttatattttaggttattaggagtaggataaataggttttttgttaagatttttgaattagttgtttttatagtttttgagttttagttttttatttttatagattagtttgttatttttgagtttatattttaggttattaggggaagaaaaagtagattttttgttaagatttttgaaatagttgtgtttatagtttttgagttttagttttttatttttatcgatcgatttgttatttttgaatttattttttaggttattaggggaagaaaaaatagattttttgttaagatttttgaattagttgtttttatagtttttgagttttagttttttatttttatagattagtttgttatttttgagtttatatattaggttattaggggaagaaaaaatagattttttgttaagatttttgaattagttgtgtttatagtttttgagtttcggttttttatttttatagatcgatttgttatttttaagtttatatttcggattattaggagtaggataaatatgttttttgttaagatttttgaaatagttgtttttatagtttttgagttttagatttttatttttatagattaatttgttatttttaagtttatatttcggattattaggagtaggataaatatgttttttgtgaagaattttgaattaattgtttttatagtttttgagtttttattttttatttttatagagtagtttgttatttttgagtttatatttcgggttattaggggaagaaaaaatagattttttggtaagatttttgaaatatttgtttttatagtttttaagttcgagttttttatttttatagattaatttgttatttttgagtttatattttaggttattaggggtaggataaataggttttttgtgaagatttttgaaatagttgtttttatagtttttgagttttagttttttatttttatagattagtttgttatttttgagtttacgttttaggttattaggggaagaatagatagattttttgttaagatttttgaaatagttgtttttatagtttttgagttataggttttcgtttttatagattagtttgttatttttgattttatatttcggattattaggggaagaaaaaatcggttttttgttaagatttttgaaatagttgtgttcgtagtttttgagttttagttttttatttttatagattaatttgttatttttgagtttatatttcgggttattaggggtaggataaataggttttttgttaagatttttgaattaattgtttttatagtttttgagttttagttttttatttttagaaattagtttgttatttttgagtttatatttcgggttattaggtgtaggataaataggttttttgttaagatttttgagttagttgtttttatagtttttgagttttattttattatttttatagattagtttgttatttttaagtttatatttagggttattaggagaaagataaataggttttttgttaagatttttaaattagttgaattagtagtttttgattttgagttttttatttttatagattagttcgttatttttgaggttatagtttagggtggttagagtaaaatattgaggttttttatagtaagagttatgtcggtttttattatttttgaattttaattttttgttattatagattagtttattttttttgagtttattatttaatttagttgtattaagaggtagagagtcgttgggaattttggttttttcgtagtttttattgattataagttttgttttgtatttttggaatttaaattttaggttttaaggaattaaagatggggagtagtgagagtagttgaattttttatagttatttttgagtttgtttttttttagttttttgagatattaatttatgttttttagatttaaaaggtggaattagtaggtagatttaggtttatttcggagttttagtttaaggttttttaaagtcgtaagaggtttttagttattatggatttattattatattaaaaatagttttaaagaggggaagttttttagaagatagtgattattaaggaagaggaagaagatattgtagagaagttagggaaggaagaggtgaggagagggttgggattataaagttgggaaaaatgattttagggttttgaaatttttattaagattttttttaattttaggatgtcgtgattttaaaattaggtaagagaaagagagattaggtagaggaggagtttaatagaatattaagtcgtagttttcgacggattaaatttaattaagaattaatagtttttaaagtaagagataaaggtatgggattttgtgggagatagagatgaggggaggatgtaaggagatttagaggattgtagagatgggtgttgatggtatgggttgtcgtaattattttaggttaatttttttataggtgttttttataggagtggtggatgttcggggagagcgggttgtgttggtattggggggaagtttggttggtttagcggtagaggttttttatttggttattgatcgtattcgtcggatagttaagtttttgtgtgttttggggcggggaatttttattttgtttttggattggttgtattaggtgagaggttaagggatgatgatagatcgatatagtggtaagattgtttatatagtgttttagaaagtggtggaagggaagaggcgttataggaagataggggtattggtgagttagaagtttgtattgatttaaaagatattttgtgagttttttttaaatgttaggtagtagagttgattgaggggttgggttgagttttgatgttgattgttgtcgtttttagtttcgtaaggttggtttttttttattttcggatgaatatgtggtgatcgattttgagtaagagaagaattttggttttagtttttaagacgtattgagtagggttcgggagcgaaggttgttagaggtgagaggttattttttaatttgtgttttagttttttttttagtgttttttaatttataatattatttttattattttttttttttagggttatgagatttatgtgatttttggagtttagttattattattttagatgggagagattattagttgttgtggaggtatatatttatttagtatgtttcggttttataaggtatgtttaggatgttttgggtttgggtgaggtggtagtggtagttaaagaggtggttggaatggtaaagattggagggaaaaaaatggaggtttagaaaggaatataaagtagtgagagggtgggggaaaagatttatggtatagaaagggataggaatgaggggatagatttgttgatatttttatataataattatcgagatttagtagtagtttaatttagattatgttatatttgttttatttatttttttttttttttgatttttttttttttttttttttgagatggagttttatttttaggttggagtgtagtggtataatttcggtttattataattttcgttttttgggtttacgttatttttttgttttagtttttcgagtagttgggattataggtgttcgttattacgttcggttaatttttttgtatttttagtagagatggggttttattgtgttagttaggatggttttgattttttgaggttatgatttgttcgtttcggttttttaaagtgttgggattataggcgtgagttatcgcgttcggtttttttttttgattttttttgttgaagtattttatttttttttatttttttttatttttttttttttttttttttttttttttgttgaaatattttaaagtaaattgttaatattatattatttttttttatatatttaaatatatatttttaagaaatacgtatattttattttataattataatgttattattgattttaagtaaaattaatagtagtttattggttatttgtttatattttattaataaaattttttttattgtttgaaaaatgtttttatatagttgtttaaattaggatttaaataaggtttatatattgttatatttattatttttttaattatttttattttagagtattttttaatttatttagttatttattttatgtagaagttgggttatttgttttttagaatgttttttagtttggaattttgggtttgtttttttgttatataatttattttgtttttttgtattttatattttttggaaattgtagataattgtaaaagtttgaataaatttaggtttatttttttagtaaaagtattttttttttttgagagagttttattttgtcgttaggttggagtatagtggagtagttttggtttattgtaatttttatttttcgggtttaagttgtttttttgttttaattttttgagtagttgggattataggcgtatattattacgtttagttaatttttttatttttattaaagacggggttttattatgttggttaggatggtttcgattttttgatttcgtgatttatttatttcggttttttaaagtgttgggattataggcgtgagttattgtgtttggtttttagtaagagtatttttttttttttttttttttttttttttttttgagatggagttttgttttgtagtttaggttggagtgtagtggcgcgatttcggtttattgtaagtttcgttttttgggtttttacgttatttttttgttttagtttttcgagtagttgggacgataggtattcgttagcgcgttcggttaattttttttttttttttttttttttttgtatttttagtagagatagggttttatcgtggttttgattttttgatttcgtgatttattcgttttagttttttaaagtgttgtgtaattataggtatgagttattgcgttcggtttagtaagagtattttatagatagtatgcggtgtgttttatttggttttatattaggaggtattattttagtgatgttaagattggttagtgggttttgaatttatttttaggatttttttttatttgattttgtttttgttttgttttttttagttttagagagttgtgattatatgtttttaggattttttttattgttttattttattacgggttgggttgttttttttttcgtttgagtttttgttgattggagtgttgaagtaggaagttaagttagaggtttttgtttttttttttttggagatgttatttatttgagaattttattattttttttttttttagattacgaattagaagatatgtggaagaaagaatttagggcgttagaaaggattggggtatattgatataatttgttttggaatatgggtgggattagaaatttttatgaataaatgaaaagataagggatttggaagttataggttgttttttgtttgtttgtttgtttttttaatggttattttattttatttgtatttatagttttttatttgtatagatttaggggatataagattttttatatgtatgtattaaatggttattttaaaattagttagttttatgtttagatgttataagtggtagttatttttagttagattgttgtagttattgttcgatgttatttatggtgttttattttttatttggaaattatttttattttttttttattgagatttttattttggggttaggaatttgaagggatgtttggagtgagtagatttgagggtttagttatggagtgttattaaaatattttttttttttttggtttttggaagtatttttagttttgattttgggtaagtttttgtatttttttggttagtttttttaggatttataaaattagagtttcggtttgatttttgtgataaataaatatttattttgtgttttatggtgtagtgtagttttttaaaatgtttaggttttaagatataaatttaaaaaaaaaaaagttatagatttgtatttaatttattattattttttatttaggataatttgtatgatattttttaagattttttttttttttttgagatagggttttatttttgttatttaggttggagtgtagtggtattattttggtttattgtaatttttattttttagtttaagtaatagttttattttagttttttgagtagttaggattgtaggtatatattattatgtttggttaatttttttttttttattgtttagtagagacggggttttattaaatttttgtatttttggtagagatgaggttttgttatgttgtttaggttggtttttaatttttgattttaagtgatttatttattttagtttttcgagtagttgggattataggtatatgttattatattcggttaatttttgtatttgtagtagagacggggttttattatgttggttatgttggtttcgaatttttgattttaggtgatttatttgttttgattttttaaagtgttgggataataggtatgagtcgttatgattggttttttatttttttgagttaaggtgttattttgttgtttaggttgaagtgtagtggttcgatgtcggtttattgtagttttgattttttgggtttaaacgattttttttttagttttttaagtagttgggattataggtgtgtgtaattatgttcgatgaattttgtatttttggtagagacgaggttttgttatgttgtttaagttggtttttaattcgtgattttaagtgagttatttattttagtttttaaaagtgttgggattataggtttgagttatcgtgtttagttagatttaaattttaaaagttggttgattataaggatgtggagaaattagaatttttatatattgttggtaggaatgttaaatggtttagtttttgcggtaaatagtttgatggttttttaaaaagttaaatatatggatgggtatagtggtttatatatgtaattttagtattttggaggttaaggttggtagattatttgagtttagaagtttacggttagtcgggtaatatgataaaatttcgtttttattaaaaatataaaaatttattgggtatggtggtatatattacggttttagttatttgggaggttaagaggaaaatcgtttgagtttaggaggttaaggttgtagtgggtggatacgagttattgtattttagtttgggtaatagagtgagattttgttttaaaaaaataaaaggttagttacggtagtttatgtttgtaattttagtattttgggaagttaagataggtggattatttgaggttaggagttagagattagtttggttaatatggtgaaatttcgtttttatttaaaatataaaaattagtcgggcgtggtggtatgtgtttgtaattttagttatttgggaggttgaggtagaagaattgttggaattcgggaagtggaggttgtagtgagttgagatcgtgttattgtattttagtttgggtaatagaataagattttatttaaaaaaaaaaaggttaggcgtggtggtttatttttgtaattttagtattttgggaggttaaggtgggtagattataagattaggagattgagattattttggttaatatggagaaatttcgtttttattaaaaatataaaaaattagttaggcgtggtggtaggcgtttgtagttttagttattcgggaggttgaggtaggagaatcgtttgaattcgggaggtggaggttgtagtgagttaagattgttttattgtattttagtttggcgatagagcgagatttttttttaaaaaaaaaataaataaaaaaaagtagttttttttttggttggaatttttatgtagagtgttgtagataagaaggagagggtcggggtgtagtggtttatatttgtaattttaatattttgggaggtcgaggtgggtaggttatttgaggttaggagtttaagattaggttggttaatatgataaaatttcgtttttattaaaaatttaaaataaaattagtcgggtatggtggttagtttttgtgattttagttatttaggaggttgaggtaggagaattgtttgaatgtaggagggggaggttgtattgagtcgagatcgtattattgtattttagtatgggagatagagtaagatttcgttttaaaaaaaaaaagagagagaaaaagaaggaggtttttgttatgttagaaatttttaaaaagcgaaggaattttttagagttgaagattaaaggttcgagaaagaaatttgtttaaaagatgatttaaaaggtaaggaggaagtttatttatgaaaaagtgaagtattattataaggaatataggtagatgtatagaattgaaattcgaatggttaggatggttagaaaagttggtaatttttatgtatttgtaaaatttaaattgtcgtttgttattaggattagaggtattagtggtgtgaatttaaaggttcgaaaggtgttgtagttttttcgtttttgttaaatttttagtggaatttttgtgaagtttaataaggttttaatgaatatgttgaggattgtagaattatatatggtatgggggtatttaaagttgaagttagtaaatgaattaatttattagtatggttatggtaaaaattaataagaagtaaattgttttgatagatgatattttgattgttttattttttggtaaatatggtattatttgtatggaggatttgatttttgagatttatattgttggaaaatgttttaaagaagtaaataattttttgtagttttttaaattattttttttataaggtagagtaaagaaaaagattatttattttgtagaaagtggatatgttggtaatagggagaatcggattaatagatttattagaagaatgagttaaggtgtttattgtgattgtttttttaatttaagtatttaagtagtatttgtttttaaattggaggaaaaaaaagaaagttaaatacggaattatcgaatagtttagtaattttgtttttaggtgtatatttaaaagaatttaaattaggtgtttaggttgggtggggtggtttatgtttataattttagtagtttgggaggttaaagtgggaggattgtatgagtttaggattttacgggtaattagtttgggtaatatggtaaaattttgttattataaaaaatataaaaatgggttaggtgcggtggtttacgtttataattttagtattttgggaggtaaggtgggtagattatttgaggttaggagtttaagacgagtttggttaatatggtaaaattttatttttattaaaaaatataaaaattagtcgggtgtggtggtttatgtttgtaattttagtattttgggaggtcgaaggtggttggattatttgaggttaggagttcgatattagtttgattaatatggagaaattcgtttttattaaaaaatataaaattagttgggcgtggtggtgtatgtcggtaattttagttatttcggaggttgaggtaggagaattatttgaatttgggaggtggagattgtggtgagttaagattatgtcgttgtaataagagtaaaatttcgtttaaaaaaaaaaaaaaattaattgggtttggtggtttacgtttgtaattttaatattttgggaggttgaggcgggtggattatgaggttaggagattaagattattttgtttaatatggtgaaattttttttttattaaaaatataaaaattagttgggcgtggtggcgtgcgtttgtagttttagttattcgtgaggttgaggtagaagaattatttgaattagagagttagagtttgtagtgagttaagattatgttattgtattcgagtttggttatagagggagattttgttttaaaaaataataataataataataaaaaaattagttgggtatggtggtatgtggttgtaattttagttattggggaggttgaggttgtagaattacgtgaattcgggaagtagaggttgtagtgagttgagattatgttattgtattttagtttgggtgatagagaaagatttttttttaaaaaaaaaaaaaaaatttagttaggtgtggtggtatatgtttgtaattttagttatttggaatgttgaggtgggaggaggttaaggttgtaatgagttatgattgtgtaattatattttagtttgggtaatagagtacgattttgtttttaaaaaaaaaaaaaaaaaaaaaggaaaagaaaatagttatttaaataaatttttgtacgtgagtgtttatattagtattttttataatagttaaaaaggtggaaataatataaatatttattagtaaatgagtggataaataattgtgatatatttatataattaaatattatttaattatagaaaaggatgaaatattgatatatgttataatattttgaggatgaatattaaaatattttgttaagtgaaggaaagttagaaatagaatatatattatgtgattatatatgtaaggaatatttagaataggtaaatttatagagaataagagtagatttgtggttgttagtggttgtggggtgggggagatgagaaaatggggagtaattttatgggtatggagttttatttgggggtgatgaaaatgttttgaaggtttagcgtggtggtttatgtttgtaattttagtattttgggaggttggggtaggtggattatttgaggttaggagttcgagattagttggattaatatggtgaaattttgttattattaaaaatataaaattagttaggcgtggtggtatatgtttgtaattttagttatttgggaggttgagtaggagaattgtttgaatttgggtggtagaggttgtagtgagcggagattagttattgtattttagtatgggtaataagagtaaagttttattttaaaaaaaaaaatgttttgaaattagatagaggtggtggttgtatttattattaatatattaatgtattaaatattattatattattttttttaaagtggttaggttaggtcgggtgtggtggtttacgtttgtaattttagtattgtgggaggttaaggtgggtggattatttgaggttaggagtttgattgagattagtttggttaatatggtgaaattttatttttattaaaaatataaaaattggttagatgtggtggtgggcgtttgtaattttagttatttgggaggttgaggtaggagaattatatgaatttaagaggcggaggttgtagtgagttaagatcgcgttattgtattttagtttgggtaataagagcgaaattttgttttaaaaataaataaataaataaatataataaagtggttaggtaaggtatggtggtattttgggaggttaaggtagtaggattatttgagttaaggagtttgagattaatttgggtattatagtgagattttattattataaaaaataaaaagttagttgaatgtggtggcgtatgtttgtagttttaattatttaggaggttgaggtaagaggattatttgtttagaagttcgaggttgtagtgagttgtgattatattattgtattttagtttggatcgtaatttaaaaaaaaaaaaggttaattttatgttgtatgaattttaatttttaaaaaatagttgattatttatgtatatttttttgtatgtaagtaatatttaagtttggaaaattttggtgtagtagaaatagtatgagatttgttaagtattttgttggttattaaatatatttaattttataatatatattaagtatagttattgtgggggtggtagatagtatgatttagataaatattagtttttttgtataatttaaagtttttatattttaaaattgtttatgtttcggaggttttgatttttttttttttatttttttttttttttttttttgagatagagttttatttttgttgtttaggttgggtttaatggcgtgatttcggtttattgtagttttcgtttttcgggtttaagtgatttttttgttttagttttttgagtagttgggattataggtatgtattattacgtttagttaattttgtatttttggtagagatagggtttttttatgttggttaggttggtttcgaattttcgattttaggtgatttatttattttggtttcgtaaagtgttgggattataggcgtgagttattgtattcggttttttttttttttgttgttgttgttgagatggagttttgttttgttgtttaggttggagtgtagtggcgcgatttcggtttattgtaattttcgttttttaggtttaagtaatttttttgttttagttttttaagtagttgggattataggtgtgtgttattatattcggttaatttttgtatttttagtagagacggggtttcgttatgttggttaggttggtttttaatttttgatttcgtgatttattcgtttaggttttttatagtgttgggataataggtatgagttatcgcgtttagttttttttttttttttttgagacggagttttattttgttatttaggttggagtttagtggcgagattttagtttatcgtaatttttatttttcgggtttaagcgatttttttgttttagtttttcgagaagttgggattataggtttttgttattatatttggttaatttttgttttttaagtggagacgaggttttattatgttggttaggttggttttaaatttttgattttagatgatttaattgtttcggttttttaagtgttgggattatagttgtgagttattgtgtttagttagagattttgattttttattatatttgttgtttgtagagtattatgtagtatttagttatattttttttttatgagtggtattatttaaatgttttaggttaaatatttagagattagggatttttttttatatttttttgtattttatttatttatttttttgtttgagatagaattttgttttattatttagtggatttttttgttttagttttttaagtagttgggattataggcgtatattattatatttagttaatttttaaaattttttagtagaaatggggttttattacgttggttattttggtttttagtttttggtttaaagtgatttatttattttagtttttcgaattgttgggattataggcgtgagttatcgagtttggttttttatatttttaatgaattttatagtttgtagtatattgttttgtgtggtaagtgtttttatttatggttttagtaggaaatgaatagtatagtgaaattaggataatttgggggagagtttaataaagtgataattataaagaagtaggtagggtgtagggaaattagaaagaatagtgtagtgttttagtatttatagttttgttgtgattatttttaagtttaaaaagatgaggatagagtagtcgtgtagagaggattttttttttttttttttttttttttttttttttttttttttttttgagatggagttttgttttgtcgtttaggttggagtgtagtggcgcgatttcggtttattgtaagttttgtttttcgggtttacgttatttttttgttttagttttttgagtagttgtgattataagcgttcgttatcgcgttcggttaattttttttgtatttttagtagagacggggttttatcgtggtttcgattttttgatttcgtgatttattcgtttcggttttttaaattgttgggattataggcgtgagttatcgcgttcggcgagaggatttttttaataaaaattgtgatttttattgatatcgtttatttgggataatttattgaagtagaaagtagggtggagattgaatttaagggaaaatataagatgtttggtatagtatataatagtattgatttagaggagggtgggagtattgagtttaggagacggagaaggaatgtaaagtttgcgagaggttgtttagtaattatttggttttttagtttataggattagtagttttttaatttaggtaattatttttttggatttgttttttttatttataagttgatggaattagtttaatgatatttaaggtttttattatgtgtacgtttattgtgataaggtttttagttgtatgatttttaattttgataaaggttattattataaatattttaatatgtttattttcgtggttattaattaataatttttggtattattataataaattttttagtatttatagagaagttatttgttatttttagtaattggttagttaataatttaattttatagtaagttatagaatttattttgtatattgtattttgtataatgtattttatatattaatttattttgtggtaaaatagtaattttttattttagatgggaaaattagacgagttgagatttaatttacgtgagcggttgtagagtcgttatttttaatagttttttttcgggattttaatatttttttttgtgacggagagatagtaggtcgggatacgtattttagaacggatttatagttggatggggaaggttgcgttaggcgggtcggaagtttggcggtggcgtgtaggagtttcgtttttttgggttggatttagtcgggggcggggtcgcgggcggggtttgtggtagcgggaatttcgatttcgtttttttttttatttttttatttttcgttatggtttttgtattgtttttgatttttgttgttttcgttttttttattttggtttttggtatcggagtggagttcgtgcgttttattttttttcggttattttttggagggatttcggagtttggtggttcgggtgagcgggagggatcgaggatgaattgggaggaggaaggtggagtcgtaggagagggattgagggcggggtttggaaataaatgataggggaagtttaagagagggaattcgaattttgaaagcggtcgagaagttataggggagggagatttgagttttaaattaggaatttaaggattagagttttggagaggcgggagagtgaggattgagggagtcgaaaagggcggtgatcggagtattttaagtaaagtgttttgtagagaggattgttgagaggagagtgttaaaaagaaggagtatttggagaatcgaagtaagaggggtaatttagcgtggtttttttagttatgttttttgtaattgtttaatatgtgttgttttataaatttttttttttaggtttgtaggaggtttagggaagagggtagaaattagggatggaaaagtgagatgggtatagtttagagaggaagtattaaggtttttgaaagtagtaagggatatggtttggggatttaagaggagatgagggtgggggaaatattttgttattgtttcgattttttgttttttttttttttaattttttgtagatgttcgttagggatggttggttgttttgtaggatcgtagtatttttgtttttttggtatgggatttggggtttttgtttttatttgttgggtagtatagttttatggtagttgaaagagtgaaggtatggatatttcggtattttggggttttttagaggttattgtatgtggtttgtattgttttggttttgtaggtatgaggttttggttttgtaggtatgaaattttggtagttgagtttttaagggagattaagtgcgggaggggtgtcgtggattggaggggtaaaatatgggtttaggaggagaattgaggaattaattttagtttttatttttttatagtatatattttattttttattaagaagggtgtatttgtttttttttaagtataagatatgttttttatttttgtaattttgtttatgttttgtttgagattttttttttttagttttattttttttttaaaattatttttttaggtttgaagagaaggttttgtttgtttttttattgggtggttggtataggttattattttgcgtagttattaggttattttatttattttataagtttttagggtagagataggttatttttatatttttgggattttatttagtacgtattttttatatggtgaatatttggtggtgatgtttaggagagaggtgggggagagttgtaggttagtttgtgatgggggtagatttgggtttgggttttttaaggtcgggtagattaggttattgggatatttagttttttatttttttatagttggtgatgcggtattgggagtttatatttaaaggttttgtgttgtgggaggttcgggttgagttatgggttatttgggtgttttttttttgttttgtgttttatgttattttttggttttttatttttagtatttttttcgtttttgattatgttgagtttatgggttttaaataggtgaggtttcgagatttttatttatgatttttgattcgttttagaatttttcgtttttttttaagggtttttttttttttatgtttttttattgtttttttgtttttttttcgtggtttttttttttgattttttttcgtaagggtagtaagtatgggttttttgggtttggggaaggtatatggattagaagttaggattagggatttaagttttagaaggggggtttttgggtttgagttttagaagggtggtgtttggaagaggaggaaagaagtgtttaagatgagaaaagggtttgattttatttttaagttttttttttttttttaggtatattattatgtgttggggttgggcgagtttttggttttgaagttttttcgggtttttagattttttttttatttgcgttatttagtgtgtgtggagttgttgatagtgttgtgggtggtgtttattttgggtacggatcgttttttttttgtttttttttttattttttatttgggtttggtttacgggtttgattagtaagattttcgttattttcgggtttagttataaagaaaattttatttgttttttcggttttaggatggggaggtagagtgaggagtttattttggttataagttttgttttttttttttcgttgaattttaaatttttaatatttaggttttggttgttttatgttagaggtttaaatttatggattgaaggagatgttttttttattatttgagattttattttttgggtttagttttatattttaaattttgagttttagttattgaattttaaggtttattttttattagtaaggaagagtggggtatggaagttatttgtttttttattgtttagagtatgatatttttttttttaatagttttttgagaaggaaaggatttgttttgattatttttttggtattgttatttgtttttgcgttttaggggtttttttttgtatcgttggtttttattttaagaaggtggattagggtttgtaagtttaacggttatagttgtttttttaggttttaattttgttttattattttcggttttagtttttgtatttttttaggttttgtttttgggtttagattttaatttagttaaggggatttttttgtttttaattcgatgatttggggttttttgttttttcgaggaagatgttttgtaggaaaataaaagttagtttttttttatatatggtatgtagtttgttagtgttttttaagttatagggttgagtttgggaaagaaagttagagggagtttgggagtatcgaattggagtttgggtagttattacgttttttggtaatcgttggggttcggttattttcgtagattcgtttttattttgttagagcggtcgggtttttatttttatttttttaaattttttttttttcggtagtcgatttgtagatttaagggagataggttgaagttagaaagagtcggggtagtagttttggtaggggagggagtatttaaaatttttggtttttgagcgttttttttgtcgtttatttataaagttttttatagtttggcggttgttttcgatttcgtaaaataaaggattttagaggttggatttatagatttagatgagaaggtaaaagcgtagggaggagcggtaggagatgggaagggcgggtttcgttcggagtagttgtcgtttttttttaaagttttacgaggggtttgagttacgggttatcgttttgggtcggcgagttgggggaagggatttggatatttggcgtgttcgggcgggaagttggtgagggtttttggggatagagcggaggattagtggttggggcgagaagagggtagtttcgtagcgagttttacgcggggtgggagggatttaggtttcgtttttttttcggtttcgttttgcgtttttttttttttttttattgtttttagataaagcggtcgtcgttttcgttcggttttttggtttttgttttcgtttttttttttttgttgtttttttttttttttttttttttttttttttttttttttttagttttcggatttttttcggtttttttttttttttttttttttttttggacgttcggttttttcgtattttttttttcgggggtttcgcggtttgtgagttgattgaggggtttagatttggggagtgggtgttttttcgtttttgtttttgttttcgtttttggttcggattttggttgttttttttttgtgtcgagattgttagtttgtgcggttatagcggggtggagacggtcggttttgttacggttttatgagagcggggacggggcgtaggatttgtaggcgtcggggagaagagatatggagtcggtttttggtattttggggtcgcgtggggtagtcggtgggggaggtaggcggtggtgataggatagggtgggggtggacgttagggttttgggaacgcgttggtagttttgacgttcgggtttcgaaagtttcgggggtgggtatttttttcgattcgtttcgggggcggagtgcggggtagaggggtgggggttggggagaggcgtggttcgagcggtgttggaagcggagtcgggatttttggggttcgcgttgagacgcgttcggttgttgtcgtcgtttttttttttttttttttttggtttttttttttttttagatttgttcgtttttcgtttttttttgtttttttaatatttttttaggtttcgttgttttttggtttttttagggatttttggttttttttttttatattagtttttttggggtatcgttgaggtagtttggtttgtatttaggttttttttatttttgttatatttttttttttttttttacgttaattttttttttcgttttttttttttttttttatattttagagacggtttttaatacgtattaattttgtgttgttatatttggtttttgtttttattgtttttaattcggatttttttttttatattatttttattatttttaatttgggtttataatttttttttattttttttatttttttagttttttgtttttcgtttttttttttgtttttatttttagtttttttgttttgttttgtgttttatttttttttttttattttttttttttttatttttagttttattttcgggttgttttattttttggagttttttttttttgttttttgtttttagtgttttttatttttattttaagacgattatggttattattttagattggaagttatagttgttagttcggcgtcggtaggaggaggcgttcgttcgaggtcgagagaaagtagaacgggagcgtttgttttagatgttagtttggaaacgagggtttttggagcgtcgtcgggttaagtttgggttgttttttggggagtttagttttgtgttagggattgtagaggttggatttttagattcggatgagtttgcggtttttttggaggttatcgggttagtgtattagaatcgatttattcggtaggagcggtagtagtagtagtagtaataataacggagtgaagagttgttagtagagagaaagtttgggtttttggaggttcgggagcggagatttagttttggggagatgcgggattagagttttaagggaagagagttaagagaagagagattaagttcgagggagattagagagaggaggttggggatagggggagtttaagagttgagtttgaggtttttggaggttcgggattggaggtaaagtttaggagaggtgggagataggagttttcgattgttagaggtatggaaatggaggttgagttttggagaaattttagagcggagtttgagattagtagagtttcgagagtaaagttttaggagaaaagaggtggaaagtagattgagtttaggggaatttgtttattagaagttgggtttgatagaggtttataaatggagatttgattttagagagttttaggaatagagtttggtataattggaggtaatagagtggaggttgaggttaggagaagaaagataagattattcggaagaatgtgggagaaaagaagagtggttagttttaggggtagttttaaaagagattgtagagttgttcgagattttgataagggaggtttaaggtaatagtttcgtaggagtggaggtagtagagtagaggtttgtggaagatggcgagaggggtatgaagttaatagaagggtggaaatggattttgaatttcgggaaggttcgagaatggatatttagggatatagaggtttaaatttagaaattagaatttttagagttagtagagaagtttttggaatttttcggtgtggaggttggagaaggggaggttgagaaggaggaggcgggggtttagggtaggtttttgagagttttgtagaattgttgttttgtgttttttttttttttattagaggacgttgggattggaggtttgagatagtaggaagaggaagtagtggagttttagtttttattattagtttttttgttttttttatttttagttttaattgttttttaattttttggggatttttttatgagtcgtttgttttatggggtgaaggtagggttaggggtgggggtttttcgtcgtagtggatatatttttatcgttaattttcggcggtttgtgttttttgcgattttagttattttaatttttttagttatagttgatgttgtagtttcgggggttgggaagaagcggtatttaattgtcgaggagattttggttttggggggttattttcgttttagtcgtagttgttttgttaaggggtttttcgaaagatattataaataggtagggaagtagttaagttagattttttagaagtttatttgttaattttttttggattttggttttttttttttttatatttttgtttttttgtttttttttatttttttttgttaatttttgttattattttttttcgttttgtatatatattttttttttttagagttttttttttttattttgagtttaaaagattttgttttagtaaaggttgtttttgggtgtgttttttttagggtgtgttaggttgtttattttttttttttttgggttttgagtttttaatttttttttttttttttttttttttgagtgtgatttgttttagtttatttagtgggagagtttaaagtgacgagtttgaattagtgagggtagggttattagggtgagagtatttgtagtttttttggggagaagggatagggagtttggggtggtggagggggtggggtgggtttgtgttttagggagaaattgtagggagaagtgaatggagaaaggtttaattgtttcgtgggaaggagggtagagttgaatagggatattttaggatggaggggagaggggagatggaatcgggtcggttaaagagtagagagaaggtttttgaatttcgagtttgttttatgggagagatatagagaggttatttgaagtgggtgatttcggggttgtatatttttagttgggttattgttttagatagtgttttttttttttttgggataagaaaagttttttttttttttaaaatattttcgttttttatttttttgttttttttttttgggtttttttttttttttaagaattggtttagggatcggtttttttttttttttttgttattttggattttttttttttttagggtagtaaaagagagaagtgaatttggagatagttttgagaataggtattggttagggagtatagtgggagttttggataggggttggggttgaggttagtagagggttagaggttagatttgtaataaagatttgtaggaaagtgggggtagttaggatgattttttttggttttggttttattttttttttgtgtatatttatttgtttttagtttgaaaatttttagggagatagaggttttatatttagatattttagatttaggaagtttttttagttatatatatttttttagagtttgggaagtttagttttatttttattttatgtgttaatatttttagatttgatttttttgtgtttttagtgttagtggggaattatagggattaaagatacgggttaagttttgggtggaggggggtttatttgattttttaatttatttttatatgaagcgtaagtttttatttttaagttatggtttttgggaatttatttttagttttttgattgttattagtttgttttttttagggttgggtagatgaaaaaaatagaagttcggaaatgttattcgggtgaggtgtttagaaaagttattttttattgagagaggtttgtgtttttggggaagaatgagtagagggaagtatgaagttttggggtttaaagtttagggagtattttaggggagttaggaagtaagtgtagggtaggatttgtgttggtgattatatttaggttagagagtaggggagtcggaagtagatcgtttaaataggaagtttggggtgggggtcggaaggttggtggggttgagtggggaattttgggttttgggttttgggtttgttagatttgtgtttaggatgtggtgagagaataaggaagtagtcgttgtttgggtgggggtggggaggaggtagtatagagtttttttgatttagacgttttattttttattttttattttttgttagtattttgttttttagggattgggtgttttgttttagttttgttgtaatatattggtttaggaataggagataggaggattttgttattaattttcgttttattttttttaaataattcgtttgtaggttaattttattaaatttatttttgttattaggagagaaattttagttttgttattggagtttaggggatggttgtggttggtgttttattttagaggttttttggttgggttgagagattagttttattgtgattttatatagttgatgggagaggagcgagtgagttattttttttttatttttttatttttatgtaggttgtgtatttttgagaagtttagttagaagttggtggggggtgaggagataggtagggtagggggggagatataaatatagatcgagagtaaataaaataagttatttttagagtagaaaataaagtatagaggttattattttaaaagaggatatgagaagaaaataaaaatgggtttttagaaatgtgggtaaatttgttagttatagaaatttaagcggttttttttgagaatttgggatataagtagtttggttgttgttattagattttattagtagttttatagatatgaattgggggttaaatgtgtataggttggattattcgtagatcgtttttttagtattggttttttgatggtattttatgtgaggtttgaataaattttaattttttgtattgtattaatttttaagtttttttttttttttttttttttttttttttttttttgagatagtttcgttgttttttagtttggagtttaatggtgagatttcggtttattgtaatttttatttttcgggtttaagtgattttttagttttagttttttgagtagttggaattataggcgtacgttattatattcggttaattttagtatttttagtagagacggggttttattatgttagttaggttggtttcgaatttttgattttaagtgatttatttgttttggttttttaaagtgttgggattataggggtgagttattttattcggttttaagttttttttaatagtagatatgagtataatatattagtaaattatttagtaagttagaaggtggtaagtgattatggaaaaaaaaatagaatagtggaatttagagggttaggaggtagggggagtgaatatggagattttaaaatagggtgattaggagggttagagttatggggatattttgggggagtgttttaggtagaaggaatagttagtattgttttggttttgaggtaggagtgcgtggagggaattaaggttagtgtggttggagtggaggaagaggttagagaggtaaggggagggtggtatattgggagtattttgtaggttttggttaggttttgggtattttgggggtaattaagtagattttttttttttttttttttgagatagagttttgttttgttgtttaagtcgtagagtagtggcgcgatttcggtttattgtaattttcgtttttcgggtttaagtaatttttttgtttcgttttttcgagtagttgggattataggtgtacgttattatgtttagttaatttttttgtatttttagtagagataggttttattatgttggttaggatggttttaattttttgattttgtgattcgttcgtttcggttttttaaagttttgggattataggtatgaattatcgcgtttagtttggagtagattttttgttttaagtgagatggggagatattgtagggtttagagttaataaggagtaatatatatagtttttgagttttatttttttatggggatttaggtgttatatttggtttttttttttttttttttttagagatagtgttattttattgtttaggttggtttcgaatttttgggtttaagaaattttttcgttttaattttttaaagtgttggggttataggtgtgagttattatgtttgattggtgttatattgatgtagtttttaataattatttgtttagttatttttttggtttttttttttttatattttagtttattaggggatttagggatgtacggttgattttaagtttttttaaatagatgttagggaaggtttgagtagattatttggatttttttaagtagtttatatggaatttttttgttgtttttttaatttttttggtttttagatttaattttattttgttttttttttttgagttttttaatagggtaaaggggaagggtagaaaggtagtgagaatagttgggattcgtttgtttttgggatagtgtgattattaagggttttttgtgttttgtttggtattttgtttttgtgtttgtttttttgggtatattgtggatttttattttaggtttgtgtggatttttttttttgtttttgttattttttttagtttttagggtgttagtggtttattttttttttgtgtgttgttggagttttttggtttttttcggtttttttgtttattttttatttttttttaggttttagattttttttgttatggataggagaggaatgaggagagtaggagggaataggtgtttagggttttgggttttgtataggatagtaaggggttgtgggtatgaaaattttgtttttgtttgagattcgttttttagttagttttttttttattggttagtttgttgggtttttttgggaagtttattcgattgtttttaaggtgtttaaagattcggttttgattataagatttatcgttatgtattttaatttttttttatttttttgttttttatattcgaaatagtagggattttggttttatattatttatttttgttttttaagtttttgttaacgtatagggtaaagtttgatgttttgaaatgatatgatcgaagagggaaattttagaattggagagttagtatggaaaggaaaattggattttagagtggatggggagagtgagtggggtatttgagtttagtttttatttttacgtttcgttagttttatttgtttttttgtagatttcgtttttttcgttttcgtttttttttttttaattttcgcgggttttttttttgttgattttgttttttgtttttttttttttttttttttagtttaagattttttttagcgagatagttttggagattacgtattaatattttttcgagagttcggtattggaggagttgggttcggagtttgaggtttttagtgtttttaattttttagtagtttaattcgacgacgaagaggatgaggaagagttgttgttgttgtagttagagttttagggcgggttgcgtattaaggttttgattgtgggtaagcggaggtttcgtcggttcgagggcgttttttgttgttagagcgggcgttgtggtttaggagagaggagggaggattatatgtaggtattcggaaggggtttggcgggttttttggtttaatatgtttttttaatagatgggtaaattgaggttttcggtagtgaagtatatattgagtttttaggttttaaaacgagaattttttttgagtgttgtaatttggttaaaattatagggtgggtcgataggtttgagttggaattttagtttgtttttttaattgtgtgattttagggaaattatttgattttttgttttagtttattatttatgaaatgaagttaataataattattttttgtggtttatgtttgtaattttagtatttcgggaagttaagacgggtggatcgtttgagtttaggagtttaagattattttgggtaatatggtaaaattttgtttttataaaaaaattgaaaaattatttaggtgtgggtcgggtacggtggtttacgtttgtgattttagtattttgggaggtcgaggcgggcggattacgaagttaggagatcgagattattttggttaatacggtgaaattttatttttattaaaaatataaaaaaaaattagttgggcgtggtggcgggtatttgtagttttaattatttgggaggttgaggtaggagaatggcgtgaatttgggaggcggagtttgtagtgagtcgaggtcgtgttattgtattttagttttgataatagagtgagatttcgttttaaaaaaaaaaaaaaaattagttaggtgtggtagtgcgtagttgtggttttaggtatttggaaggttgaggtgggagtatcgtttgattttaggagttggaggttgtagtgaattaatattgtattatttattgtattttagtttgggtaataaaggaagatttgttttaaaagaaataaataggttaggtacggtggtttacgtttgtaattttagtattttgggaggtcgaggtaggtggattatttaaggttagaagtttaagattagtttggttaatatagtgaaaatttatttttattaaaaatataaaaattagttaggtatggaggtggatatttgtaatttttgttattcgggagtttgaggtaggagaattatttgaattcgggaagtagaggttgtagtgagtcgagatgacgttattatattttagtttgggtgatagagtgaaattttgttttaaaaaaatagaaattaaaaattattttttagatttgtagaaaatattaagtaattttatttatttatttatttatttattttgagatagcgtttttttttgtcgtttggattggaatgtagtggtataattttggtttattgtaatttttgttttttaagtttaagcgatttttgtgttttagtttttttagtagttgggattatagatgtgtattattatatttggttagtttttatatttttagtagagatagggtttttttatgttggttaggttggttttgaatttttgattttaagtgatttttttgttttagttttttaaattgtttggattataggtgttttaggttaagattaagtaattttttgtgaagtattaagagttatagttggatattatattatttaattttttttggagttatggtgagattaaatagttataaggatgtttggtatagagttcgagttaaatgagtgatggatgtggttattggtggtaatatgttttagatatggaagatattataggattttttgtatgttaattgttttttaatttgtgtgggggggaagggtgggtagaaggtagaggtttttatttattttttaatattattgtttttttttttatagatgagttttgtcggcggtgattattttttaatatagggatatattttttttttttttataattgaagattttggagttcggaagatttagggtagatagattttgataatgagtttggtagggaagggtaattaatattttgtaatttgttttttttattttgtttttgggggtagagttaattgtttaatttttattttaatttaaagtttttggtgtgggtggggttaaacgtgttggtgtattttaggttatttaagagtgagcgttaagttttgagaaggggtatagaattttttggagggtggagatggagtatttgttttttatggtagggtatattttttttatagtttttttttttattatttcgtggggattttcgggatttaagtattcgtttttttgggaggtttagattttattttatttataggtatattttttttattttttaggttattgtttttttgtttatagtttttgtttttttttttgattatagtttggtttataaattttattagtttttagttttatttgttaaagttttaggtttataagttacgtttatttgttgtgtttgcgtggaatttttttttttgttttttttagtttttttattggagtgatttgaaggtgtggttttttttatttttttttagtattattttgttttagttttttttaagagggaaggttggaatttttaattttgtattttttgatagttatttaattttgttttttttagtggtttataattgaattgaattgagatggtgtcgggtggttaaggagatattttatttttttttttttattgtgtcgtttttattaattgtttgttttgttttgtttgttttttaattttttataataaaatggagttttttttaattcgtttgtttttttttttttgggaaaaaaaaagggtatgtgaggggaggttttggtggttgggggagaggaaaatgatgggggatgaattaggaattcggtattgatatgttaaaaggggtttgggaagttgtacgtgggttttacgtaggataagtaggtgatatgagaaagggtagttgaagtgtttattagattggaagtgttatgagggttgattatattagttggatttattgtaatattttgtatttgttaattagtagatacggaattatttttagaatgaatgataataaatgaatgaatagaagaaaagggttaaaatattatagaggatattttgagttgaagggttttagtatttagaagtttgttgttatgaaggtagttaggtagtgtatgatataatttatgtggttaatttagggatatttatttaaagagttggggttacgaatattaaatttgaaattgttgtaaaatgaagtaagtatgtataagagttagttttttggaaaaggtttttttttgatagataatggattttatatcgttaaaggtttaaaggtcgggtacggtggtttacgtttgtgattttagtattttgggaggtcgaggtaggcggattataaggttaggagattgagattattttggttaatacggtgaaatttcgtttttattaaaaatataaaaaattagcggggtatagtggtgggtatttgtagttttagttattcgggaggttgaggtaggagaatggtatgaattcgggaggtggagtttgtagtgagttgagattgcgttattatattttagtttgggtagtagagtgagattttattttaaaaaaaaaaaaaaaggtttaaaaattattttgatagtgtatggttttggtgtttatgtagttgatatttggaatttttttattttaaagaatattttatataaatgtggaatattaatattttatttattaggaaaatttgtttgtttgttgttagttttttaggttaataaagatatggttgaatagttatagtttttttattattataagttgttttttttagattggttagaggaggttttatatttttattataaaataaaatatatgagataaattgaatttaagtatacgttaaaggtttttaatttattagtaagagaataagttaggtgttaaaagatttagttagtttagagaaggtttgggtagggaaggaaatagaatgattatattagtagtttgttaggtaaaggttttaaaaagtttttagttgtgatttaggaaaatagagttaggaagtttcgaggtgttaggggtgtttatagtttattttagaaatagaaaataatgtatttaagaggttaggttaggtgtggtggtttatgtttgtaattttaatattttgggatgttaaggcgggtggattgttttatttgaggagtttgagattagtttgggtaatatgatgaaatttcgtttttattaaaatataaaaaattagttggacgtggtggtacgtatttgtagtttcgtttatttaggaggttgaggtaggagaattgtttgaatttaggaggtggaggttgtagtgagttaagattacgttattgtattttagtttgggcgatagagtgagatttcgagattttttttttaaaaaaaaaaaaaaaaaagttagtgatgtagatttatttgtggttattaataagaataatgttttattttttaatagtagtgtttggtaattgtaattaattataaaagtatgatgtaggattaaataaattagatagtagagtatcgagtaataaatttagtttttttttttgtttttttttttttttttgagtatagttttggtttgttgtttaggttggagtgtttgatttcggtttattgtaatttttggtttttgggtttaagagatttttttgttttaggtttagtgcggtggtttacgtttgtaattttagtattttgggaggtcgagacgggcggattatgaggttaggagtttgagattagtttgattaatatggtaaaattttatttgtattaaaaatataaaaattagttgggcgtgatggtatgtgtttgttatatttgtaattttagttatttaggaggttgaggtaggagaattatttgaatttgggaggcggaagttgtagtgagtcgagatcgtgttattgtattttagtttgggtaatagagcgagattttgtttttaaaaaaaaaaaaaaaatttttttgttttagtttttagagtagttgggattataggtgtatatttttatatttggttaattttttgtagagatggtggggttttattttgttgtttaggttggttttaaatttttggttttaagatatttttttgttttagttttttaaagtgttgggattatagtaagagttattgtatttggttttgtttatttttaaataagtagttattagtgatttttttaagttgttaagtaaaaatgtagaatatagtttgtttgttttttagtttggagattttgtttttaataattttttttagttttttagtttttttttgtttagaggtttttttttatatttgatttgtttttatttttgttgtaggtaaattagttttagtaacggttatttttttgtttgtttgagatagagattttttttgttgtttaggttggagtgtcgtggtgggatttcggtttattgtaaattttgttttttatgtttaaatgatttttttgttttagtttttcgagtggttgggattataggcgtatattattacgttaggttaatttttatatttttagtagagatagggtttcgttattttggttaggttggtttcgaatttttgattttagataattcgttcgttttggttttttaaagtgttgggattataggtatgagttatcgcgttcggttaataatgttaatatgttttatgagtatggattcgattttttaatttgaaatagaattttattttttttttattttgtatagtttttggttttataaaatttttatattttttttattatgtattttgttttttttttatcgtaaaatgtaaatttggtaaggaatttttgatttgttttttgttatattttagggacggaaagtaatgagtatatattaggtatttattaaattaattttatttgttgaatgaatgcgtgagcgaagtatttatagattgattattagggggcgttagagaaattggatagaggcgaaatgaagaaaaaagaattatttcgagtttttaggtatggtttcgcgaggtttgaattcgttcggttatcgtagtgtttagaggtcgaaaaagtatagtttttttcgggtttcgcggtacgggaagatagttttgggatgtcggaagattttagaggttttaaggtagttgatttgcgaagttgaggttttagtcgagggttttaggtttttgatcggtttagtagtgagcgcggttgttcgacgttttagggtcgggagtagggagcgtgagtcgttatggcgacgtcggcgggtttggagcgttgggtttaggacgagttgtattcggtgttggggttgagcgagcggtacgtcgtttagtttttgatcggtatcgtatagcgttgtatttttgtcgaggagttcgtgtagcgtttacgagatattgatattttggattttagtgggtcggttcgggatttcgttttgagattttggaataaggtgtcggtaggggtggggaggggttttgtgatttgtttcggtgaggttggtttaacggtttatcgagaagttaagaaagtttagtttataagtatttattttttgttcgttgtcgcgtaggtattgtgttagttgttggacgtttagtttagtggagaagattgaggagggtttaggtgtgtcgggttaagcgtaatagaacggtgtttttcgaatttttaatatgtatttaaggtttttgttaaaatgtagattgcgatttagtagggattttagtttttgtattttttttttttttttttttttttttgagagatatagtttcgttcgtttcgtcgtttaggttggagtgcggtcgtaagattacggtttattatagcgtcgatttttttggttgaagcgatttttttattttatttttttcggtagttgggattacgggcgcgcgttattattttcggttaatattttttatttttatttttatttttagagatgaggttttggtgtgttgcgtaggttggtttttaattttttagtttaagtaatttttttttagtttttttagagtgttgagattataggcgtgagttattatgttcggttttttttattttttgaatttttttttagtcgtttaattaatagagggggtcgggtgtagtggtttatatttgtaattttagtatttcgggaggttgaggtaggaggattatttgagtttaggagttcgagattagtttgggtaatatggcgaaattttcgttttataaaaaaattaaaaattagttgagcgtggtagtgtgtatttgtgtttttagttatttaggagtttgaggtgggaggattttttgagtttaagagggatagagtgaaattttgtttgtaaaaaaaaataaaaaattttatttaggatgatgaagatggggtgaagttatgaggaagaaagagaatgaatgttggttagttggtttaaaattaagtaattgtgttcgggtgcggtggtttatgtttgtaattttagtattttgggaggttgaggtgagtggattatgaggttaggagtttgagattagtttggttaatatggtgaaattttatttttattaaaaatataaaaatagtcgggcgtggtggtatgtgtttgtaattttagttatttgggaggttgaggtaggagaattgtttgaatttgggaggcggaggttgaagtgagtcgagattacgttattgtttgatagtggggtcgggtcgcgggggtaggaaagattaagtaattgtttaaattaggaatagagttaagtgggagggtagagattaggagttgtttagatttttttatttttttttttattgataggtattacgaaaggtagtggtagaaaagttagttcgggtagtagagcgagaggttcgggttttgttggagaagaatcgattttataggttattggaagatagtgaagagagtagtgaggagattgtgagtagggttggaagtagtttttagaagaaacgtaaaaagcggaaatattttaggaagaagcgtgaggaagaagaggaggaagaggtttttgagaaagggaagaagaaaatagggtaagttagaagtagggtgagagaggatggggtaggttgaagtgttttttatgtttttatttaattttttggatgggttgtagggggagtaaatagtagatagagaagttagagtcggaagatgagtgggaacggatagagcgtgaacgtttttaggatttggaggagcgtgatgtttttgttgagcgggttcgatagcgggataaggatcggattcgaaatgttttggaacggttagataagaaggtgaataggagtagtatgttttgtaaatttttaagattttagggtgaaatttgaggttggttgtgagtgtagagatagtgatttttgggaagataaggggttgtttttagtgagatgtttatttttgtggtgagagaagttttgtgtattttgtggttaagataattgtttgttgtatttgtaattagagagattttttattgagaggggatattttttgtgttagggcgtatttgaatgatttttgtgattttagaggggagtagttgttagtgtgggggttttttggttttatatttttttatttttgtttttttttttaggtttatgaagaggtttagaagcgttttaagatggtcgaggaagatcggaaggttatggtgagttttagggtttagggagttaagattagaagataaaaggaaagattttttgatagagtgtatagggagagaggatatagaggaagtatagtgtggatgttgatggggtggttaggtttttagaagaggggtttggttgttaggagttagttgaggatagatttatgttgttgagggaaggattttttttaagttgtagggggaaggaggttatttataagttttttttgatttttaattttaggattaaatatattttattagtgaatgaaattgtgagttttttttatttttgagttttaatgagatatgaggtagttggaatgttgttaagaaggttgttggagggtaagggtagggtagtagttttattgtatagggatgtgttgattatttagtttaggtatattatttttaaatatttttttattatttaatttttgtattttttatgtggttttgtgatttttttgtgtttttttattggatagggatagagtttttgtaatttataaattggattttttatggtgtgaaattaggtagggtaagttgttttttaaaggtttggttttgttaagtaaagttatatttagattttttaatattttaatagaattttgagatttttgaagtttttttttttttttttttaaatttttttttttttttttgaaacggggttttgttttgttatcgaggttggagtgtaatgatgcgatttcggtttattgtaattttcgttttttgagtagttgggattataggcgtatattattacgtttggttaattttttgtatttttagtagagacggggttttattatgttggttagggtggtttcgaatttttgattttgtgatttatttgttttggttttttagagagttggaattataggcgtgagttattatgtttagttttttttttatttgttttgttttattttttatttttatttatttatttttgagatggagttttattttgttgttaggttggagtgtggtggtgcgattttagtttattataatttgtgtttttttggtggaggaattaagcgatttttttgttttagttttttgagtagttgggattataggtttgtagtattatattcggttaattttttgtatttttagtagaggagattttattatgttggttaggatggttttgattttttgattttgtgatttgttcgttttggttttttaaagtgttgggattataggtatgagttattacgtttggttttttttattttttaaaatttatttatttatttttttgaaatagagttttgtatttgttgtttaggttgaagtgtagtggcgtgattttggtttattgtaatttttatttttcgagtttaagcgatttttttgttttagtttttagagtagttgggattataggtatgagttatttcgtttggttaattttgtatttttagtagagatggggtttttttatgttggttaggttggttttgaatttttgattttaggtgatttatttgtttcggttttttaaagtgttgggattataggcgtgagttattacgtgttcggttaatttttggagttttaagaatggtttattggtttttaggttttttttgattaatttattttatatttttttttgaaattgattgtggttaggtttttgggatattttagtgtagttgtggtggtagtggtgttattgttttggtttgaatttaatttttcgggttttttttgagatagaattttattttgtcgtttaggttggagtgtagtggtatgatttcggtttattgtaattttcgtttttcgggtttaagtgatttttttgttttaatttttcgagtagttgggattatagatatgtattagtatgtttggttgatttttgtatgtttagtagagatagggttttattatgttggttagtttgattttaaatttttgatttttggcgatttatttttttcggttttttaaaatgttaagattataggcgtgagttattgtgtttagttgtaatttttttttttcgattataaaaatatttaagtatatagggaagttgaaagaatagaataaagaatatttatagatattatttagattgaaaaatggttaatattatgggtagtatttgtattgtaattgtaaatgtggtatgttttttttttttagattatttaaaagagttttagatattatggcgttttatttttaagtatattagtgtgtatttgttaaggataaagatattgttttttaaaattagaatgtttttgttatagttaggaagttgaatagtaatttttatgtatcgattaagatttttttataataaaagatatttttattatttttaaaataattttaatgattgtttttttttaataagaatgtagttaaggtttatgtattgtatttgggttttagatgttaagtttgtttttttttttgtttgttttattttgtagtgttttatattttggatttgtttgatttttattttgtggtgttaagtatttttttgttttgtgttttttttgaagtaggaattgggtttaaagtttattgatatttagattaaatagttgtggtaggaatattttttgggcggtgatgtgtattttatattatgttatattacggggatatattatttagttgtgtatttatatattagtattaatattttttttattaatagttttttattaaatgtttttagaagttattggtaatttttttttgaatatgttatttttattggggattgtaaaatggtgatttttttttttttttttttgagatagagtttcgttttgtcgtttaggttggagtgtaaggtgcgatttcggtttattgtaagttttgtttttcgggtttatgttatttttttgttttagttttttgagtagttagaattataggcgtttgttgttacgttcggttaattttttgtatttttagtagagatggggttttattatgttagttaggatggtttcgattttttgatttcgtgatttttttgttttagttttttaaagtgttgggattataggcgtgagtatcgcgttcggtcgaaatggtgattttttgattttgttatttttgttacgtgtattggttagaatttgtttataaagaagagtttttttttaataattaggaataagttatagtttttttttaaaaagggtaaatgtttgtttttttttaaatacgaatttttagagtaaggcgtttgttgtaatagttattttattggtgatagattttttttttttgttttttgtttgtgtgtgttaaattggatttatgaatttttattttttagtattttataattttatattattattttttttaatgtttaaatggttttgattttttgtttatattaaaaaaaaaatttatttggtttttttatggaaggaatatttgattgtggtatttagattaggttatgattataaattgtattttaagtttttatagaataaataagaaaagttaaataattaaatagaattaggttttttaagggtagaatagtagaggggttttttttttaaagatgtagttttgtttttgttgtttaggttggagtgtaatggcgtgagttaagtttattgtaattttcgtttttcgggtttaaacgatttttttgttttagtttttcgagtagttgggattataggtgtttattattatgtttagttaatttttgtatttttagtagagacgggattttattatgttggttaggttggtttttaatttttgattttaggtgatttatttattttagttttttaaagtgttgggattataggtgtgagttattacgtttatttagttattagaggggttttgattttgtagtagaggaagttgtgattatagagaggatgatgttatagtgggaggatttttggtaggaaagggttttatagatattgttagttttttgttgttatttataatgtgttttgaaaagtttgtattaaaggtaaatgtgtagaaattaagtgagatatagtatggtgaagagaggttagtattagaaagttaaatatttttgattatatttgttttatagaaatattttgatgttgtagttttaattttttataattagttttttttttttttttaaattatagttatttcgtttaagattaaagaatatttaattggggttgaagattgttttttgttggtttttttattggtttttatttttgtttgaattgttttcggtttgagttttgtgtttttaaacgttggattagttttttattttttttttttttattaatttgaataaaatggtaagagtaaaatataagttacgtagatatttttttagtgtatttatattaataaagatgataatgttgtttaagaggattttttagttggattttgttgtaggaagatacgatgtggggttagtatgtagtatttaaagaggtttagatttgagtatgttattgttttggttgtgtattgtagagggaaggtagagggtgtattttgaggtttttatgtttgtttgttaggggattttttttttgtagggattggtagagaaaggggttgtttttttagtaagatgaggattcgattgtttttttttaatttaggtttttgagttgcggaagaaatttcgtcgagagtatttggttaagcgggagcgagagaagtttgaggatttggaggcggagttggttgatgaggagtttttttttggggacgtggagttgagtcggtacgagcggtaggagtttaaatataagcggcgagtgcgggatttcgttcgggagtatcgggtagttggggagtaggagaagttggaggttattaatcgttattatatgtttaaggaaattcgaggataggtgaggtgaagcggcgtttgttttagttttggtttttaagataagttgtggggaaggttttaggggattgggtaatacgtgggttatttttttttttgttttgtcgtttttaatgggtagtgggcgggggtagtaatgggaagaggggagagggtagagaggatattttgtttttgagtttttatatattttttttttttgtagttagttcgagttgtggatttagtggaggaggaattaggagtttttggggaggagtagcggcgttgggaggaggcgcggtttggggtagcgtttttgaagtttggggttcgagatgttgttttttaggagtttaagtattaattggtgttggaggaggaggagattattgagtttgttcgggttatttagttttagggtgatgaggtaagaggggagttgggagattttttgaggaagattcgtagcgagttatttagtttatatttttttttttttttttaggagtcgttagttttatttattttaatttaggtttagtagaaagagtttatttaggtcgttcgtcgtagtttttcggtgtttttatttcgagaggagtttttggttgttattgtaaattattaagtttttattattgaaggcgagataggtttagggaagattatttagatttcgtagtatttttttgaggaggtatagttattttattttttagtttgttagggtatttggtattaatgtttttatttttgttagagttttttttatattatatttttagtagttatttatttattttttttattaaattgtgaaatttttgagagtaaagattatattttttttatatttttgtttttattttttgtatttattttatttggaaggacgggtagatggataggtggagtggggcgtgtataaatgtggatttttttatgttttaacgtggttaaaaaataaggagttaaaggattatttttttgtttttttgttagttttttttttttttttttggagacggagttttgttttgttatttaggttggagtgtagtggtgcgattttggtttattgtaatttttgatttttgggtttaaggaatttttttgcgttagtttttagagtagttggaattataggtatgcgttattatatttggttaattttttagtagagatggggttttattatgttggttaggttgttttcgaatttttgattttaagtgatttagttattttagttttttaaagtgttgggattataggtgtgagttattgtgtttagtttttgttttattttggagataggtttttgttttgatgtttaagttggagtgatgtggtattattatgatttattgtaatttgggatttttgggtttaagagattattttattttagttttttgagtatttgggaggtgtatattattatgtttatattaaatattttttgtttttttttgaggtggagttttgttttgttattaggttggagtgtagtggcgcgattttgatttattgtaatttttattttttgggtttaagtgatttttttgttttagttttttaagtagttgggattataggtgcgtattattatatttagttaatttttgtatttttagtagagatggggttttattatgttggttaggatggttttaattttttgatttcgtgatttgtttattttagttttttaaagtgttggagttataggtgttagttattgtgtttggtttgaaatttttttttttttttttttgagatagagttttgttttgttgtttaggttggagtgcggtggtatgattttggtttattgtaatttttgttttttaggtttaagcgatttttttgttttagttttttaagtagttggaaatataggtatgtattattatgttcggttaattttttgtatttttagtagacggggttttattattttggttaggttggtttcgaatttttaattttaggagattcgtttgtttcggttttttaaagtgttggaattgtaggtgtgagttattgtgtttggttaaaattttgaatttttaatttttttgttatattatgttgtttaggttggtttcgaatttttgagtttaagttatttttttattttagttttttaaagtattaggattataggtatgagttattgtgtttagtttttttgtttttttattttagttggttttgttttagttaatttgtttttttttagtttaagtttagtagagttatgaatttaattatttagagttgggtgaggattttttttgagggttttaggtttgttattttatttatttgttttttttttttggtttttagtatttgttttttttttttttttttttgtttggtttttataatttttttttttgaaatgtatttggttttagggtgtatatttagtaaagggtaaatttttttttttttttttgttatttagggttatataaataagggtatgaagattgtttgtatttaatttcggagagtggttgttatgagtgtggtcgttcgagtggttcgggagatgggtgtgaagtttgggaatgaggtgagatttttagggaatcggggggtagagtttggggtttgtgatttagtttatagtttttttaggtttttatagtagaagttttggtgttgttttattttatttttttttaagttttttttagggtatattagtttatatttggttgttaatggtttttttgattaggttggttatagtattcgttttgaggattgtatattagagcgaattgtttttcgttatatgatagatgggatgttttttcgggagtttttttttgagtttgatttggcgagttataggtatttttaatttttggttttttttttttttttttttatttagttaatttagttattgttttttgattaatttattcgtttttgaatttttgtggtttaaatggtttttgaattgatttttaggtattacggagatggggttggaggatagaagagattgtagagaaagttttttttttttttatttatttttagggtttagaaaataattaggatagtagagtattgttgtcgagatttgaaatatcgtgtgaagattatttgaaaatatttggaatgtttagtttagagggagaaataggaagtattttggttttttttaaatatgtgaaggttgttatatggaaagaaggattagattgttttatgtgattttatacgatatagttaggagttatggggaggttatagggagatagattttaatttaatattaatggttgagtaatttttagagtggtggagattgtagggtttgttagagtggttggattttgggttttggttttttatataagttttgggtagtttggtttgtgaataatgagtttttagtgttggaaatggttaagtaggggttggttgaatatgtgttgagggggaaaagggatttatgaatgtaatgggggtggggttaggttagttgaataatatgtgtttttttgattttttagaggttgtgaatttttggttttggaagattatagtggagtaattggatagataggattttattttttatattttttgtaaaagatttttaagaatttatggagagttagttagcgtaagagtgtttgatgtagatgtttttgtttatcgagttagtttgttttgtggaatggttggggattttattattatagttagggttaggtataaagagttgaggttagggaggtgggtaggggaagatggggatgagtttttgggatttggttgttatttagaaaagttaaagaataaagagaaagaaggtgttatgtatataattgagttaggaggaaattaaggagtatgtagagttttgtgagagttgaggtagaaaggtttaatttgtttttgtttttaaaagaagaaatagttaagaatgatgttagtagtagttgttttataggatattaggagtttttaggttatttgaattatagtagtttaggtttattatttttagttagttttgttggtttatttttattgaaagggattttgttttttatttttttttttttttaaaacgtattagtcgggcgcggtggtttacgtttgtaattttagtattttgggaggtagaggtaggcggattacgaggtaaggagattaagattattttggttaatacggtgaaatttcgtttttattaaaaaatataaaaaattagttgggcgtggtggcgggtatttgtagttttagttatttaggaggttgaggtaggagaatggcgtgaacgtaatttaggaggcggagtttgcggtgagtcgagatcgtgttattgtattttagtttgggcgatagagtgagattttgttttaaaatttcgtttttattaaaaatataaaaaattagttaggtatagtggtaggtatttgtagttttagttatttgggaggttgaggtaggagaatggtgtgaatttaggaggcggagtttgtagtgagttgagattatgttattatattttagtttgtaatagagtaagattgttttaaaaaaaaaatttttttatttttttttttttttttttttagatggagtttcgttttgttatttaggttggagtgtagtggtacgattttggtttattgtaatttttgttttttaggtttaagcgatttttttgttttagttttttaagtagttgggattataggcgtttattattatatttggttaattttttttgtatttttagaagagacggggttttattgtattggttagattggtttcgaatttttgattttgtgatttatttgtttcggttttttaaggtgttgggattataggcgtgagttattattatgtttagtttaaaatatattttttaattttttttagtaagagtagttgttgagtttaagtagatttttgattgaattagagggtatggttaatttgttttggttttagtgtgtagtttttatattttgttttttattatttgttgaggttgggataggttgtagattatggggttttggttttttttgattttttgttgttttatataagtgggatggttgatttttttttagagtttttttcgttaatagttatttttgaattttttgtgtttattattttttttttatttagttaattttggtgtttgatattgtattgtttagcgttttttttttattgtttttttattttttttttagcgtggtgatggtggatgaggtatacgaaaggattttatatatagatattttttttggattgattaaggatgttgttcgttttcgatttgagtttaaggttttggtggttttagttataatggatattgttcgtttttttattttttttgatgacgtttttgtgtttcgaattttcggacgtaggttttttgtggatattttttatattaaggtgtttttttagggaggatgggtttaagtttgtggtagaaaagttgaggtttttggagaaggttattttgtggagggaaagatggaatggaaggtttaaaggggaattaggataaagtgtatgttgaattgggaggagaggaaaggtttgtttaagtaggtggtttttttgtgattttatttttttttgttttttaggttttagaggttgattatttggaagtttgtgtagtatttgtgttgtagatttatgtgatttagttttttggggatattttggtgtttttgataggataggtgtttgatatggtggggagaggggatgatgtattttaggggaagatagggtcggtatgttggttttttgtgattttgggatttttgttgttttttttattttttatttaggaggagattgaggttgtttgtgagatgttttaggatcgttgtcgtcgtttgggttttaaaattcgggagtttttggtgttgtttatttatgttaatttgttttttgatatgtaggttcgtattttttagtttatattatttggggtacgaaaggttagttggagaaatttatattttttatttttatgttttttataattagtagtgaaaaagttgtgtgtttgttttatgtaaggtgagttttgcgtattgttgtatatagttgaggagtagttagttttttgtttttgggattgaagagaggagaaatatggtgtgaattaagagagagttaaatatgtgatttggaaagtatgtatagtagatttagtggagaagggaagtttttgatgtgttaagaggtgggatttgatatggatttttaagagaaatgtttgaggttaggtgcggtggtttacgtttgtaattttaggattttcggaggttgaggtgggcggattatttgaggttagtagttcgaaattaggttgtttaacgtggtgaaattttgtttttattgaaaatataaaaattagtagggtatggtggcgtgcgtttataattttatttgtttaggaggttgagttatgagaatcgtttgaatttaggaggaggaggttgtagtgagttgagattgtgttattgtattttagtttgggtgatagtgcgagattttattttaaaaaagaaaaatggttgagaagttattagaggaaggtttaaggtatgtttgaggttagagtgtgagttagtaggtttagtgggaggtttatgtggtgaaggagtaggagataaggttaaaaataatttggggttaagattagggagggtttttgatgataggaaagtttggattttatttattttttttttttgagatagagtttcgttttgttgtttaggttggagtgtagtggtaagatttcggtttattgtagtttttattttttaggtttaagtgatttttgtgttttagttttttaagtagttgggattataggtgtgtattattattttaagttaatttttttttttttttttttgagatggagttttattttgtcgtttaggttggagtgtagtggtattaattttgtttattgtaatttttgttttataggtttaagcgatttttttgttttagttttttagtagttgggattataggtgttttttattacgtttggttaattttttgtatttttagtagagatgaggtttcgttattttggttaggttggttttaaatttttgattttaggtgatttgtttattttggttttttaaagtgttgggattataggcgtgagttattatgtttggttaatatttagttaatttttagtagagatggggtttcgttatgttggttaggttggttttgaatttttggatttaagtgattcgtttgttttggttttttaaagtgttgggttataggtatgagttattgtgtttggcgaagtttggattttagatagttgagtagtagttaaaggattttgagtagagatataatttttatttaataaatatttaatgagttttttttgtgtgttaggtatataggggttgatgatatagtgatgaataaaataaagtttttagtttaataaatttgtatttgtggtttatcggggaagtagtggatgtataaatatatattgttaatttgtggttagtgttatgaagagatataaggtagtatagtaggatggaatttgattttgtggggtgggagtgaggattggtatgaaggtattttttttggggtgtagggagggtttttttagtaaggggaaagtggaatagagatttaaattaggtgagggagggagttaggttgatatttgggagaagagtatgttagatagagggaatagttgatgtaaatgatttagtgaggagtgtatttatttgggtagagtaaagtagtgtgtgggaggagtgagggaggtggtggagtgttagtagatgaggttagaaaggtagttggggtaggtgatttaggtttttaaggggtttggattgaattttagagtaggataggaagttattgaaggatggggagtgatgtgataggtttgtattttaaaaggattattttggatgttatgtgatagaggttaggagtagaagtagggatatacgttaggaggtttttataggaagtgttgtgtgaagacgaaagcggtgatggggaggatggggtaggaatttgaatatttttattttttatttttgaaaaaaaaaaaaattttaaatttttttttttattttttttttttttatggttttgttgatttttagtttttatttttttgttttttgttttttggttttgttttttgtttttgattttggatattattaatttttttagtttttgttttttattgtaattgttttattatttttaattttttaagattattttttttgggtaattaggtaggtggggttattgggtgattttatattttattatttaggtggttgtggtaacgaatattgttgagatattatttattattgagggtattatttatgtgttggatttagggttttgtaagtagaagagttataattttcgtataggtatggaatcgtttattgttatattttgtagtaaggttagtttggggatgtatgggagtgggggaggtggagttggtttatagagaaggtttaatttagaagtagggtgggggttttttagggaatcgggatgagtagtttgtatttttttagattttttgtataaatattgttttttttttttttttgattaaattgttagttagtttgtttttttttttttttaggttttagttaattagcgagttggtagggtaggtcgggtggttgtagggaagtgttttcgtttgtatatcgtttgggtttattagtacgagtttgaggaaattatagtgtttgagatttagaggattagtttgggtaatgtcgtgttgttgtttaagagtttaggtgattgggttatttgagagaggagggaggggttggagttattgttttttgaagggattttgttttatttattatatttttttttagggatttatgatttaatgtattttgattttttggattttttattatatgagatattgttgttggttttggagtagttgtatgttttgggagtttttaattattttggggagtttattacggtgagtcggggggtagtatgggtggaggtaggatgataggggttaggatggttttagggatttttgtagtagtagcgggaaatttgagggaggattgggtttaatttttttttttttttttttagtttggtcgaaagatggtagagttgtcggtggattttatgttgtttaaaatgattttagtttttgagaagtaagttttcgtttttatttgggtttttagtatataaataggttaggttttttttgtttttagggttttttttgtttgtttttttttgtttattatattattttttaatatataataaagtattagataattttgattgtttttttttgaggtttataagggtaagatatttgattttatttttgattttattgcgttcggttttttgaggaatttatttgtttttaaggtttttaattagaatatttagatgtagttgtggagggatgatttttaaatgttatttttttgttgttagagattttttttaaatgtatatagtgaatgtatattttttgtagaagttttagaatttttcggtgttttttgtttttgtttttatggatgttttttttttgtgattgtgttttatttatggtttttatttttttgatttttaagttgttgttagaatttatttgttggttgttttgtagttattatgttaattagttttttttatatgaggaaatatttattatatagtgattattttttattttattatatttgtttttatgtgttttgttttgaatttatgtttttttttttttgttttaggtatagttgtttagaggagattttgatagtggttgttatgttttttgttaataattttattttttatcgattaaaggataaggtcgtttatgttgataatgttcgtgttaatttttttttttttggcggtgattatttggttttgttaaatgtttatatataggttattgggtttgggtgagtgggaatgagagatattgggggattttagttttgttgtatatttaattattttttttttttttttaattgtttttttagtgggttgagagtggttattttttttagtggtgttatgagaattttgtatagtttagatcgatgcgtcgagttcgggatgtgcgggaatagttggaagggtttttggaacgtgtggaagttggttttagtttttgttagggggattatattcgtgtacgtaaggttagtatttttttagttttttgttttttatttttagtatttttttaggagtaagtttttttgggggtatgtagtattttttttagcgtgagagtatgtttttttttttttgtgtatgacgtgtttttttagggtttttttttttttagattattgaaggtttatttttgggaagttttttatgtattttttatttttttagtttttttgaagtttgaattaaaaaggtagtgtatttttagggtttttagatgtttgttttttttattgatttttttttttgttcgttttttaggttattattgttggttatttttattatacggtacggttgattcggagtggttatcgtatagtgaaatagtagtagatagtttttatttattttaatttttttttttttgagtaatagttacgttggttgttttattacgaatttgttttgattattaaagagtttatgagataggtgaggagaatattttgtgtttacgtaggtggagattatgtagagagatggtgttttggtaagttaagaatttaggtttaagttgttgggattggtatagaaagaggaaggtagggtaaaatagaaagatattttttgtttttttttgttttttttgagacggagttttattttgttgtttaggttggagtgtagtggcgtaatttagttttattgtaatttttgtttttggggtttaagagatttttatgttttagttttttaagtagttgagattataggcgtaagtttttaggtttggttaatttttgttatttttagtagagatgaggttttattatgttggttaggttggttttaaatgtttgtttcggttttttaaagtgtagggattataggtgtgagttattatgtttagtttaaagatattttttttaataggtgtgttagtattttttaagatttgagaattagatatttatttaataaatatttgaatggttattgtataggtgttggggttataatgaataaagtagtttttggttttatagagtatagtttttatgttttaggttttttttttttttgagagagtttcgtgttgttgtagtttaggttggagtgtagtggtattattttagtttatgtaattttcgttttcggttttaagtgatttttttgttttagtttttagtgtagttgggattataggtgtttattattacgtttagttaattttatatttttagtagagattgggttttattatgttggttaggttgatttcgaatttttgattttatgattcgtttgttacggttttttaaagtgttgggattataggtgtgagttattgtgtttggtatgttgttttagattttttttgggaatagtttatttggtattttgaataatatatagaggtgtatttgttttttgggtatataataatagagttaggtatttttatatttagttttgtagttaaagaggaaagataatttttgattatatatataaggatttaggttggggttgggtatagtggtttatttttgtaaattattttagtattttgggaggttaaggtaggattttagtattttgggaggttaagattagtttaggtaatatagtgagattttaattatataaaaaattaatggtgtattgtgatgtgtgtttgtagttttagttatttgggaggttgaggtagtaggattgttttgagttatgatacgttattgtagtttagtttgggtaatagagtaagattttgttttaatttaagaaaaaaaaataataataataaaagatttatgttggaaagaagggaattttattgatttttttttttttttaggtattggagattgagagtagttggtttttggaggtggttttttattattataaggttaaggagttagaagatttttatgttaagaaaatgtttaaaaaaataggtaaaatacgagaagagttagggtaagagaaggacgtaaatagaatttgatattagttttttttttttttatatattatttaatatttattaaataaaattatttttggaataaagtttgtgggaatatttgggatttagagaaagtgatatgtgaaattttattttatatagttagttaaattttattatttataagttaaattatatagtagttttatatagtatgagatggaaaggaaggaaggagagaaacgaggagaggaagttggtttttgagatttttggttgtttttattttttttttttgggcgtagtagtttttagtgttgtttttattttaaggttaaggattagggtttggaatataggtttaagttaggttttggttttgatagttttagggttattagggtttttattagtagtttttttataggcgttggaggtgagtgtgaaggtattagttgtagggagaaaggttaatgttagttgggggaggtatataaatgttttattttttattttatttagttttatttaggatttattttatttagacgatggcgataaatgaggttattggaatttaggtagaaagtggagtaggtattataggttttggggaatagagggaggtttattgagggagaaggtgattggttttaaagttgaatttaagtatttgtttaaacgagtagtttttaaattttgttatatattagattatttgggtaatttataaatattttagtgtttaggttgtgttttgttttaattaaattagagtgtttggcgttaatattttttaacgatttttgggtatttttattgtgtagtagtttgggaattgttggtttaaaaatttatatttaatgtttgtggttgagtttaataatttattgggattttatttttaggcggaaatttattaggttgtaaggtttaatatatgagataggattttttatttgtttagtatttttgtgtgtgtgtgtgtgtgtgtgtgtgtgtgtgtgtgtgatagggttttattttgttatttaggttggagtttagtaatgtgattacggtttattgtaattttaattttttaggttgaagtgatttttttattttagttttttaagtagttggaattataggtgtgtattattatattgggttaatttttgtatttttttgggttttattatgttggttaggtaggtttttaattttttattttaagtgattcgtttatttcggttttttaaagtgttggtattataggtatgagttattatatttagtttgtttagtaagtatttgagtatttattatgtgttaggtattgtataggaagaaattgaagtttagaggtttttttaatatatttagtttttattttttttttaatattaatataaattaaataggatttttgtttttaaatagttaagtgaggataggttaagggttgtttgggagattagattatttgtaattttagtattttgggaagttaaggtaggtggattatttaaggtgaggagttcgagattagtttggttaatatggtgaaattttttgtttattaaaaatataaaaattagtcgggtgtgatggtgtgtttgtaattttagttatttaggaggttgaggttggagaattgttggaagtcgggaggtagaggttgtagtgagttgagattacgttattgtattttattttgggtgatagagtgagatttcgttttaaaaaaaaaaaaaaaaggaattgattatagtttgggtttttttttattttttttttatcggtaatgttcgtttttgttacgtttgtagaatcgtaaaaagagtaagtggacgggtagttttataagtcgttatcgggtttgtagggtttagtttttagggtggcgggttagttgtaaaatttttaaacgaaggtgtgtaaaataattttaggttaggaaacggtagagggttagtgaaagaatgtattatgttcggtttttgtgaagaagggatgggaaagaaattttatgatggtagaattagaaaattaaattggtttttaaggaatggggaatagttgtgagaagtagtttaggaatttttttgggaagtgaaaagggttatgtatatatttttgggtgttttttttttttagtgttttatttgtgttttaatttttatttggtacgtatgttgaggattttattgatgaattttatatttaaggaatatagattgtagtcgtgggattgaaggaagagtttgggaagttaggtggaagaagatggtattaatttagtgggaaagaaaagataattttattttttagttttttaatttttttttttttttgagacggagtttagttttgtcgtttaggttggagtatagaggtataattttagtttattgtaattttcgttttttaggtttaagcgatttttttgttttagtttttcgagtagttgggattataggtttgagatggagtttagttttgtcgtttaggttggagtgtagaggtataatttcggtttattgtaattttcgttttttaggtttaagcgatttttttgttttagtttttcgagtagttgggattataggtatttattattatgtttagttaatttttgtatttttagtagagacggggttttattgtgttggttaggttggttttgaatttttgattttgtgattcgtttgtttcggttttttaaagtgttaggattataagcgtgagttatgtgttaggtttagttttttatttttaaggtttttttatttttattttggagtgaaagattttattttatgattaattttttttaatttaaaatgaggaatattattttttttttttttttttttttttgagacggagtttcgttttgttgtttaggttggagtataatggagatatttttttttattgcgttttttgggtttaagcgatttttttgttttagttttttgagtagttgggattataggcgtttgttattatgtttggttgatttttgtgtttttagtagagatggggttttattatgttggttaggttggttttgaatttttgattttaggtgatttatttgtttaagttttttaaagtgttgggattatagtattttgagttatcgtgtttggttggaatattatttttttaggaaaatgtttataatatatttttatgtttgttttatggttttaaaaaagaatttagttgattatttttgtacgtttaaggattatttatattttttttattgtagacgaaggttatttttgtattgatttattttttgttttagttttttatatatgatagatagatgtttttttatattaggattttttgacggggtggtaggggaagggtgggtagttttagggatttggaaaggtatttaagttttaggataggggtagggaggttttttaaaaaggtttttaagtttatttaggtagtcgttatgtaatttaggttttggtttttttttttttttttttggagggagaattatttatgttgagttgagggtttggatttgagggagaggtagtgggggaatttggggaagacgttgggtgggaaggcgtgggggtaggggagattagaatagaggagaagatggggaagtggttgtcgtggagtggggttaaaggggtgggaatggtagagtttttggataaagttggttttaaggagaaagaatagaagggagaaagataagaatttatttgtttaatattttttgattttttggatgtttaataggtttttaatatttattttttttgatagaatggatggaattattataggaaaaaagggatggatttatttttatttttattgaaaataggaggaaattattttattttattatttattttgagatggagtttcgttttgttgttaggttggagtgtagtagtacgattttagtttattgtaattttcgtttttcgggtttaagtgatttttttgttttagttttttgagtagttgggattataggcgcgcgttattatgtttagttagtttttgtatttttagtagagataggattttattatgttagttaggatggtttttattttttgatttcgtgatttattcgtttttgttttttaaagtgttgggattataggcgtgggttatcgcgtttagtcgagtaaattgttttatgtgatataaatatcggtattttttaaaatttagtagatattttatttttttttttttttttgagacgaagttttatcgtcgtttaggttggagtgtattggcgcgaattcgggttattgtaatcgtcgttttttgggtttaagttatttttttgttttagtttttcgagtagttgggattataggtattttttattacgttcggttaatttttgtatttttagttatagatggggttttattatgttggttaggttgttttcgaatttttgattttaggtaattcgtttatttcggttttttaaagtgttgggattataggcgtgagttatcgtgttcggtttagtgttggaattttaaagaaatgtggtcgggcgcggtggtttacgtttgtaattttagtattttgggaagtcgaggcgggcggattacgaggtttaggagttcgagattagtttggttaatatggtgatattttatttttattaaagatataaaataattagtcgggtgtggtggcgggagtttgtagttttagttattcgggaggttgaggaaggagaattgtttgaatttaggagacggagattgtagtgagtcgagatggtgttaatgtattttagtttgggtgacggagtaagattttattttaaaaaaaaaaaaaaaaagattttaatattgggggtagttttattttttttatcgtaagaattatgtaatatatatttgatgagttaacgaataataggttttattgtattgtggattaaatgttgtggtttgtatatttttatgattaagtgtgcgaggtaaatgtatagagaaaaaagaatatttagttgaagttaggaatttgaattttattatgtaattttaggtatttttattttttatgttttcgttttttataaatgttttataaatgagaataataaagttttattgggttatgaggtttatatgaaataatgaatgtaaataaaacgtagcgatttagaaagtagtatataaatggaagttattattatttcgggtttttttaatgatagatataattttaggagatagttaaaggttggtttttatttttttgggtttatcgacgttgaaattgtaaggggaggttatttaaagttaggttttattcgagttttttcgtttttaaggaattttttaggggatcgttttattgtagggaaggcgggcggatcgttcgggtatttcggttttcgatggtgttttagaggcgtcgtttttgttgggggcgtggttattttgttagttcgggcgtaggggttcgaatcgggtgtatattggtcggtttttttgttaggatcgtttttcgagtgtaagacgggcgggttgttgagggcgtttcgcgggtttggtttgggtcggggaatttcgggacggcgtcgtagtagggttacgaatttttcggtttttgttttttaaattatttttaggtataggtaatcgcggagagtcgggcgtaacgtagacgcgtttcgttgtttggttttgatttcgtttgatcgtttttaaatttgggaggatcgacgtttttgcgcgataggttcggtaacgtttttttttcgttttcgcgatttttagtttgtttacgcgttgtagggtataggtgggaaggggcggcgggtgtttttgcgtttgcgcggaatttagcgcgcgtttcgttttacgtatcggttttgaggagggttttttttcgttttttttttttttttttttttttttttcgtttatttggggtcgagtttggtaggcgcgtaggtaagggtcgagacgtcgggtcgtatttcggttgggttggtatatgatttttcgggagtggagaaggagttttttgagttcgattttcggtttttttataggggtgagcgcgttttagagtcggtttcgtgaaggggaaaggaggtcggggcgagggggtagggggggaaggggttgagggagggaaacggagatgtttcgcgtttgcgtattgtaggttcgagggaagcggttgaagcgttttgtcggttgtaagcgcgtttgcgttcgcgggttcggagattgtttgagtgcgtttgcgtaagttatagttttttttgtttttttaagcgttgtatttatagttgaggtttttgagtaaaaagttgagtaaaaatagggttgaaggttgaatgggtgtaacgatagtgaggggtgaggcggttgaaataatgagttaaattttttaatagtttttgtgataaaaataaatatttttattggtttggttaaaagatataaatgatttgaatttgataagtttgttgaatgaatgaatgaatgaatgtatttatttattatgagggttgggttttggtttttttttgtagtgagggagaaataatattttgaagatgtttgacggggttgcggttattaaggtttggtgttgcgacgtttttgtaggtttcgaatgaatttggcgttgagtatgtttttatttattgtttaggattgggttggcggggtcggggtttgtggaggagttgtgtgtatgggtttttttttagatttattttgtgataaggtttgttttttattggtagatttggtaggtggggagatggagagtgggttataggaatattaaagaggaaattaagattatagattttttaaggtttcgggttaggttttaatgtaggatatatgatgggtatgaagttggaattattagtgttatgtttaaatttaaaattttttagagaattcgtattttaaagggaagtattagagttgaatttgtgggggaaaggggtttgtaggatgtaaggtagaaggaattgtgggaggagttggtgtttagtttatacgataagatttaagagtaggaagtgattgagaatgatgttaggaagggagttagatggtggtgggaggttgttaggggaggggtttagattttatttattttttgttttttgttttttttgtttggagttttggttgtttgtggaaatattaggtatgtgaatgggaaggtaggagtagatagtgaatgtggtttatttgatttgagggtagggaggagtgaatatttatttgtattgggggatgaggaatttatttttttatggcggttgtagtagtagttttgggttattagatttgggggagtttttttgtagaagaaatgggagatgatggggaggaggttattggatgaaagatgggtgggtatggaggaattagaggagaggagtaaaaggaatagtataggaataaagagaagggggtaattattatttttaataggttttaattaaagttgtgttttagaaaagggcgggggaagtttattttatatttaagattttttggagtgtttttgatttattgttttattttttttagttgaggtaatgtgttaaatttatggttaggtgtgatttaaattatgttagaagaatagatttatatgtggttaaaaatgtgttggatcgggtattttggtgtttggtttggaaaatagggttattttaattataagattttttagattaggttgggcgcggtggtttaggtttgtaattttagtattttgggaggttaagacgggtagattacgtgattaggagatcgagattaatttggttaatatggtgaaatttcgtttttattaaaaatatataaattagttgggtacggtggtgtatttttgtaattttagttatttgggaggttaaggtaggagaatcgtttgaatttaggaggcggaggttgtagtgagttgagattgtgttattgtattttagtttggcgatagagtaagattttattttaaaaaaaaaaaaaaagattttttagattagagggaaataggaagtgataaggttgaattttgaatttaggaggaaaaggaagggggtttttgtaaatagggtgatagattgtgttgtatttttaatggaggtaagggtttgttttgagagagatttagcggtttagtggagtagacgttaggtaattagagtgggaagacgaatataggaggtaggaggtaattagtggatttagagatgttggtaagttttgatattttggtaaaggtacgtttagagtaaagggtagaagttattggggagagttggaggtttttggagggaatgagggagtagatacggaagtttatatatagggatttagtatttatatgaaaggagatatagaatttgtaggaggattaatagtgaagatggggataggtagatattagatttaggagttttgaggtttttgggtaaaagatgtgtagattttagaagtgagaaatgagagggatagaggttttgagattttaggaaaataagggatgacgtataaatgaggttgataatttttttttttgtgatttttttttttattgaaaatgttaatttagaaaatataaaagattttatattttatttagataatattgagagaagaaaagggaagagtgagtaggggagatggggagattcggtttttaaggattttaggaaatatagtggggtatttgatttagtatatatttagagggtagggaggggaagggatttagttatattttgggtatggagtagggaaggtcgtttttgttatggaggaaaggagagaggaaggatagaggaagagtggttttttattttatttcgataattttataagataggagtatatcgggatttagttattagggagggatggatgtaagaagggattttaggatttaatagatttttgatattttggatttatttttaagaaataattttttttagagaatttggatttgggggaaatggtggtgttagttaattttttttagagattttaaagtaatattagtttggggttttttgatatttatataaaatgtggaaatgaagagtttggtaatggtgagtagatttttttgggaagttggtaagtttttgttttatttaattagattgttttgaagtagagtttgtttattagcggttattcgtaggtttaaagggtaagtgtggtaggtagtataaagtagtattagagttattagtagatattagagggaatatggggtttattttatagataaaattttttaaaaagtttttttggtataggatgtttttagattttttatggtgttttaaagtttgatagtaagtaagagtgtgtttttttagataaatgtatgagttatttaattaagaagtttggtaatagattagattttttgttgggaaagtatttagagtttaagttaggagagaaggggtgtttttgtgttaagaaaagttataaagtgttaggtagtttgagattttgatatttttgttgtttaagaaagtagaagagggaattttatgggttttgttaggttttattgggttttataggatgtaatggaagagtgggtttgaggtttttagggaggggttttttgtttattttaggttttttagggtagggagagggtagttgttagtatcgattttttttagagcggggaagggagttgtggaaggatgttatggatgggaggaagggagatgggaaatggcggggggcgggggagagaaaaatagagaagttagaggtgaagagaaagggagagaaataaaggaaatgtttattttttgtttgttgcgatggatttttggtatataagttagtggttttttattttttgttagatattgttttttttttagtaagtattaagcgaagatttttttaattttagaaggttttgtttttttaatttgatggatttcggtgttttttttattattttatataatttttatattaaagttagggtttttaggttttatataaggttttattttgtttttttattgtattttttttttagattatttgtataaatattttttttgaaaggttttaggattttttttaagttatttattttattgatttatttttttgatggatttaaattgttttttgttatttttaatatttttttttatagttgtgaggttttttagttttttaatttttattatttggtgcgacgacgttgagttgggttgtttttagggttagtagttaatagaaggcgggcggtagggtgtggggggtagaggcgtaaggaacgtagtagtttttgttttggtataaaggggcggaggggatttcgttttggtgagttttttaggttgttggagcgggggggtgggtgggttggaggtgtggcgcggcgaggggttttgtttaggggttaaggaggttttatagttatttttagaattggggatagggagaatgaagagtaagatagaaaaagaagaaaaacggaagagagttatgatagtaaaggttttggtagaaaaaaagagaaatttgagtttttttttttttttttttttttttttgagacggagttttattttgttatttaagttggagtgtagtggtacgattttggtttattgtaattttcgttttttgggtttaagttatttttttgttttagttttttaagtagttgggattataggtacgtgttatcgtgtttagttaatttttgtatttttagtagagacggggttttattatgttggttaggttggttttgaatttttggatttaggcgatttgtttgttttagttttttaaagtgttgggattataggtatgagttattatgtttagtttaagaaatttgagtttttagagagaacgaattttttttttgggttttttgagtattttttttttttgtgttaaggtattttaggtttagatattttatttttgttttttttatattttcggttattagaggagtatggtttgatgtttttttttgtttttttgggtggtagtttttttgttggagttggtagtggaggggatataggtagggtaagcgttaggagatatattttgtatttttttttttagttattatattttaattttaaatttttgttttttgatattatagttttttttgagaatttgtaggagtagtattatggtaatgttagtatattaaaagggaatttgaggggaatgtggaatattgttgaggaaagttagaaggagtaggttaaatatagagttagggagaaagatcgaaggggagattttgggggtttgggagatgtaggagaagggtagttaaggggagtgagtttttattgttagtgggtgttgttacggttttttggtattttggggtagtggaatggttttagtcgggttaacgaggattttgggtttttttggatgagatggataaagtttttggttaattaggaattgttttggagaggttaggggaggtttggaaggagggtataattttttttttttatacgaaaatgggaagagattgaagttttattaggttaaaaaaaaaaaaagaaaataaatatgggtatttgaaagggagttattagagtaagtaggaggttgatgtaatgtttaaagtttagtttttttttttttatttttttatttgttttcggtttttttttttaagagattttttattatgtatgtgtggtaaatgaaagattttttagtaaatttatttaagttttatttatagtatttttttttgtaggtttgagattttattatttttgttggtttttagttttttttatagtttgtggttttgaataagttaaatgggagaagttttggaaattaaagcgagttgaggtgttttttagtgtttgatattgtgatgtttatagttggttatagattgttgtttggatggtggttatatttttttttggttatagagttagtttaggaagggggtttttttgtgtaagtaagtattgtatagttgttagaagttggtaaggtggaggtggtgaggaagaggaaggagtggggtttagattgttagtaagtgtgtttgtgtgtgtgtgtgtgtgtgtgtgtgtgtgtgtatatgggatggggaatttggatagtattttagtgtttttgaggtttggtttttttatattaattttattatttggttggaaatgttataaattttgagtgttattttttaaaagtaatatttaaattttgggttatttgtgttattattttgtgattgtaaatggaagggttgtttgtattagtttgttttttattggttaatagaagtttggggtttataaaggagtttgattttggtttatgttgacggatttgaattggtaagagggtttattgatattagttgttaaataggtttttaatgagtttgtttagttaaaagttttgttaaatataaaatgtattgagtttttatgagggtaaaggtaaatagttatgattgttggagatttgggttgttttagaattttttaaaattgtttatagatggtattgtatttcgtggtatttagagtaagtagttattattgtattatagttttatttttttaatataggttttattagcgggcgtgggatcgattgtagtagtacgagagtgtcgagttgtttttagagagggagtagggggttttgtgaggaaggaagcggcggggttttttagtgaggggtcggtaggattaagagtttagttttttttttttttttatttcgattacgtgattaataaaatgtaaaaatttacgatgttgatgggtaaagaagtttttaaagattataaagttgtttatttggaagatgaaataaataaaatataattatgtattatttaacgatggggatatattttgagaaatacgttattgggtgattttattgtgtgaatattatagagtgtatttatataaatttagatattatagtttataatatatttagattatattatatagtttattgtttttaggttataaatttgtatagtatgttattgtattgaatgttgtaggtaattttttttttttttttgagaggtagagtttcgttttgttgtttaggttggagtgtagtggtgttattatagtttattgtagtattaatttgggtttaaatgatttttttattttagttttttaagtagttaggattataggtgtatgttattatatttggttattaatttttttttaattttttgtagagatgggggttttattatgatgtttaggttagttttaaattttagggtttatgtgatttttttgttttagtttttaaaagttttgggattatagacgtgagttattatgtttagttagttgtaggtaattttaatataatggtttagttgatgtatttaaatatattttaatatagaaaaggtatagtaaaggttaggtgcggtggtttacgtttgtaattttagtattttgggaggtcgaggcgggcggattatgaggttaggagatcgagattattttggttaatatggtgaaattttatttttattaaaaatataaaaaaattagtcggacgtggtggcgggcgtttgtagttttagttattcgggaggttgaggtagtagaatggcgtgaattcgggaggtagagtttgtagtgagttgagatcgtgttattgtattttagtttgggcgatggagtaagatttcgttttaaaaaaaaaaaaaaagaaagaaagtgaaaagataatttatagaatgggagaaaatgtttgtaagttatatatttgataagtgcgttttatttagaatatatgaaaaatttttagaataaaaaagaatataatttaagaatagataaaggatttgtataaatttttttttaaagaagatatataaatggttaataagtatataaaaaggtgttaaagtttaggtttagtggtttatatttgtaattttagtattttgggaggttgtggtaggtattatttgaggttaggagtttaagatcggtttggttaagatggtgaaattttgtgtttattataaatataaaaaattagttaggtatggtagtgtgtatttgtaattttagttatttgggaggttgaggtaggagagtcgtttgaatttaggaggcggaggttgtagtgagtcgagatcgtgttattgtattttagtttgggtaagagaatgagatttcgttttaaaggataaataaataaataaaaaatttagtagggttttaaggggtggggaaagttaggggaagatatgttggaggttaggatgttattttgataattagtaattattaattttagagttattttattatatttttatatttaatttggtttttataattttggaagttattatttgaaagaaggttgggggaaatatagttttggagatatggtttcgtttggttaatgttaagtagttataagtggtagggttgggttttaatttttagatttttgattttagttgtagtgttttagttaggaaaatagtgtagttattaagagtttatttaagaggagagtttgtagtgagtcgagatggtaatattgtattttagtttgggcgatagagagagatttcgttttaaaaaaaaaaaaaaaattcgggggttaggcgtggtggattacgtttgtaattttaataatttgggaggttaaggcgggtggattatttgaggttaggagttcgagattttgtttttattaaaaatataaaaattagttgggtgtggtgacgtgcgtttgtaattttagttatttaggaggttgaggtaggagaatttattgattttaggagggagaggttgtagtgagttgagattgtattattgtattttagtttgggtgatagagtgagattttattttaaaaaaaaaagtttaatgggggttgggtatggtggtttatgtggatagtttgagtttaggagtttaagattagtttgggtaatatagtaagattttatttttataaaaatatttttaaaaattagttaggcgtgggtcgggtttagtggtttaagtttgtaattttagtattttgggaggtcgaggcgggtcgattacgaggttaggagatcgagattattttggttaatacggtgaaatttcgtttttattaaaaatataaaaaattagttagttatagtggtgggcgtttgtagttttaattatttgggaggttgaggtgggaagattttttttgagatggagtttcgttttgttgttaggttggattttagtggtaagattttagtttattgtaatttttattttttgagtttaagcgatttttttgttttagttttcggagtagttgggattataggtatgcgttattatgtttagttaatttttgtatttttagtagagatagggttttattatgttggttaggatggttttgattttttgatttcgtgattcgttcgttttggttttttaaagtgttggggttataggcgcgagttaatgcgttcggtttttttttttttttaatatggaattttattttgttgtttatgttggagtgtaatggtgttatttcggttttttgtaatttttattttttaggtttaagttttttttttgttttagttttttgagtagttgggattataggtatatgttattacgttcggtttatttttgtatttttaatagagatggggtttcgttatgttggttaggttggtagggaagattttttgagtttaggaggtagagattgtagtgagtcgtgatcgtgttattgtattttagtttaggtaatagagtaagattttgttttaaaaagaaaaaaaaaaaaaaagtttattgggtgtaaatggttatgggtttaaatgtggattttattatttattggttgtgtgaatttggttaagttattaatttgtataaatttaaaataggtttaataatagtatttattttaaaaagatgtgtaagaatttattgagatgatgtatatagatattatatagagtttatgaaatgtgaattattatttatattttatattgttttggttttatatgttaattgggtaatgtgttttatatcgaatattgtgttttaggatcgggtatggtggtttacggttgtaatcgtagtattttgggagatcgaggtgggcggattatttgaggttagaagttcgagacgtttggttaatatggtgaaattttattaatataaaaattagttaggtgtggtggtgggcgtttttaattttagttatttaggaggttgaggtaagagaattgtttggatttaggaggtagaggttttagtgagttgagattgtgttattgtattttagtttgggcgatagattgagattttattttaaaatataaataaataaataaaaaaaaattgtgttttttttattgttttttgttgttttttaatggaaaaatatattgtaggaagattttgtttattttttgttttgattttgttgtaatgtttattagtttatttttattatttttattttttaataagtatatgtttagtattttaattatattatattgtttgtagtgttttgaaaggtggtttatttttatttatttatttattttttttgagatagtgttttgttttgtcgtttaggttggagtgtagtggtatgatttgggtttattgtaagtttcgttttttgggtttacgttatttttttgttttagttttttgattagttgggattataggcgtttgttattacgtttagttaattttttttgtatttttagtagagacggggttttatcgtgttagttaggatggtttcgattttttgattttgtgattcgtttattttggttttttaaagtgttgggattataggtgtgagttattacgtttggtttgaaaggtggtttaatatttttttgtttttgtttatgtttgtttttttatatgaaatgtattttagttttttgtttatttgataaatatttgttttttaagattagatatgttatttttttttatttaatttttagtttaagatagtatttaaatttatgtttttatgttttttttgtaattatatttattaaattatgttataatggattaattgtttatgtttttatttaaggttaatttgttaattaaattttaacgttttcgtcgtttatttaatgatattattttaatagttttttttattttttttgatataataatattttttttttattgaattattttaatgttatttgtttttttatttgtaaaagattaatttttttgatttattttattttttagtttttgttttatttttatttttattaaagtaggatttaaaagagtagtttatttttgttgtgtttttagttttttagtttataagatttattgtatttaggtttttaaatatcgttgtattaaaattgtttattaagattattaatggtttaacgtagataaatttaatggtaattttttagatttttttgttttttgattagtagtatttgattaagtaaattattttttttttttggaaatattttttttagtggtttttgaggttattttattttttagtttttttttttttttttttttttttgagatggagtttcgttttgttgtttaggttggagtgtaatggtatgatttcggtttattgtaatttttattttttagatttaagtgattgttttgttttagttttttaagtagttgggattataggtatgagttatttcgtttggttaattttgtattttttgtagagatggggttttattatgttggttttgaatttttgattttaggtgatttattcgattcggttttttaaagtgttgggattataggtgtgagttattatattcggttttagtttttatttattttattagttattttgtggttgtatttgttggttttttttttttttttaatttttttttgttgttgttagaataatttagtaaaataaaatttgggtttattgttgtataatattgttttatatatatattaaataggtttaaataaataagtagttattttatagataaaaaaggtaaataaatgaaatattttatttttggtttttttaattattttatataaattaattatttatggtataattaattatatatattaaagaagttattggaatgtttagaacgagattttttgttgttgttgttgtttttgagatgtagtttcgttttgttgtttaggttggagtgtagtggtataattttggtttattgtaagttttgtttttcgggtttacgttatttttttgttttagttttttaagtagttgggattataggttttcgttattacgtttggttaattttttgtatttttagtagatagggggttttattatgttagttaggatggtttcgattttttgatttcgtgatttatttatttcggttttttaaagtgttgggattataggcgcgagttatcgcgtttaggttttttttttttttttaaataaggtttttttttttttttttttttttttttgagattataatgaatatgattatattataagtaaagttagaagtaagatagagaattttttaaaggttggtttggttatttgagattattaaaaatgattgaatttggttgggcgtcggtggtttacgtttgtaattcgagtattttgggaggtcgaggtaggtggattataaggttaggagatagaaattattttggttaatttggtgaaagtttgtttttgttaaaaatataaaaattagttgggtgtggtggcgggcgtttgtaattttagttatttaggaggttgaggtaggagaattatttgaatttaggaggtggagtttgcggtgagttaagatcgtattattgtatttgagtttggcgatagagttagatttcgttttaaagaaaaaaaaaatgattttaataatatgtataaaaatataaaatgtaaataaaaaatataaataaattttttttttaaagtatttttaaaagagtaagattttggaagttttggtttttttttttttttttgttgtaaattttttggtttgggttgggtggtggtgagtgtttgttatttgtagtggtattgtttgtggagggtaagtaggtttttcgagggcgattatgtttagattttgagatgggaagtggagggtgaataggttacggtggttttaatttaaagtttaatttttttttttttgttgtttaattatttttattggttttttgttgtttggtattaatatcgttatttttattattattagttgtttatttgtttatatcgttttagttgtttcgtttttattttcgtttttttttttattattatttttttttttttttttttttttttttttattttgttttttttttttatttatttcgttgttagttttttgttttttattttttttattagcgttttcgttagtatgggcgttttttttattttttgttttttttataatttttttttgaagtttttggtggtgattacggagtttgtgtttataattgtttttgatatggtggggtatagcggtgattcgatgtaagggattaagaagaaagtgagagtttggggattatgtcgattaagttgttagattttgaggtagtagaggaagtgtatggcggaggtggttgtggtgagtaggatatcgaattaggaataatgtaaagatggttttttagagtagttagttgggggtttttattttttaaagagggtttaaaggggtagtttttttatttataatttttttatggtgatcgtattttgtttgttggttttagatattagatgtatgttgaaaatttttttttttaaattttttttttgatttttagggaagtatttaattgtttatttaaatttggatatattatagatatttttaattaatatattaaaaatgtatttttagtattttttttaaagttggtttatttattattttagttaaagtaattttatttttttagttgtttaggttttggtattgttttaaagttttttttttttatatataatttgttaggaaattttatttgttttatttttaaaatatttaaaatttgattattttttattattattattgttattattttggtttgagttattattatttttcgttaggattgttgttgtttaattagtttatttgtttttattttggtttttttattgtcgtttttattttttttttttttttgatatggggttttattttgttattaggttagagtgtagtgtagtggtataattttagtttattgtaatttttatttttttgatttaagtaatttttttgttttagtttttcgagtagttgggattataggcgagtattattatatttggttaatttttttttttatttttagtagagatggggttttattatgttagttagattggttttgaagtttttaggtaatttatttgtttcggttttttaaagtgttaggattataggtgtgagttattgtgttcggttattgtttgtttttaatagttaaagtgattttgttaaaaaggaaaaaattaagattatagttaaaatgattttttttttttttttttgatggagtttcgttttgttatttaggttggagtgtagtagtgcgattttagtttattgtaatttttgttttttaggtttaagcgatttttttattttagttttttaagtagttggggttataggtgttcgttattatattcggttaatttttgtatttttagtagagatggggttttattatatggttaggttggtttcgaatttttgattttgtgatttatttgtttgggttttttaaaatgttgggattataggaatgagatattatatttggcgttatttttttttttttttttttttaagaaggagttttgttttgtcgtttaggtaggagtgtagtggtataattttagcggtttattgtaattttcgtttttcggttttagtgatttttttgttttagatttttaaatagttgggattataggtatttgttattatatttagttaattttggtatttttagtagagattttaggtgatttatttatttcggttttttaaagtgttgggattataggtgtgagtcgttatttttggtttgattttattttttatttaaaataaaagttagtttttgtagtagtttataaggtttttttttcgtattatttttttggttttattttttattatattttttcgttgatttatgttgttttggatatagttaatttgtttttttaggtatatttttattttacggttatatattggtggtattttttgtttgggatgttttttttttagatattttttggtttttattttttttttttgtttgtttgttttgagatagttttacgttgttatttaggttgtagtgtagtggtattatttcggtttattgtagtttcgattttttgggtttaagtaatttttttgttttagatttttaagtagttgggattataggtgcgtgttattatatttggttaatttttgtgttttttgtagagatggggttttattatgttgtttaggttagtttcgaatttttgggtttaagtgatttatttatttcggtttttttaagtattaggattgtagatgtaagttattacgtttagttttggtttttattttttttttttgagatggagtttcgttttgttatttaggttggagtgtagtggcgcgatttcggtttattgtaagttttgtttttcgggtttacgttatttttttgttttagtttttcgagtagttgggattataggtatttagttaatttttttgtattttttttagtggagatagggttttattatgttagttaggatggtttagattttttgatttcgtgattcgcgcgtttcggttttttaaagtgttgggattataggtatgagttatcgtgttcggttagtttttatttttatttttttttagttattgtttaaatgatatttttttagtgatgatttttttttaatttgtaattttatatatttttatttttattttatttgagtatttttaaatttttatttgtttttatttttttagagtatttattaattatattgtttattatgtttgtttgtttttttagttagaatataagttttattattaagatagggatttttgtttgtttttttttttttttgtttttttttttttgttttgagataagagtttcgtttcgttttttagggtggagtgttgtagtaggatttcggtttattgtaatttttgttttcggggtttaagtaatttttttgttttagtttttcgagtagttgggattataggcgtacgttattatgtttagttaatttttatatttttagtagagatagggttttattatgttttatatgttgatttcgaatttttgatattaggtgatttttttgttttggttttttaaagtgtggggattataggtatgagttattatgtttggtttttttttttttttttttttgagatggagtttttattttgtcgtttaggttggagtgtagtggtgtaattttggtttattgtaatttttgtttttcgggtttaagtgatttttttgttttagttttttgggtagttgggattataggtatttattattatgtttcgttaatttttgtatttttaatagagacggggttttattatgttgattaggttggttttaaatttttgattttaagtgattcgtttacgttagttttttaaagtgttgggattacgggtatgggttatcgtatcgtatttggtttttttttttgtttttgtttttatttttggagatagggtttttttttgttgtttaggttataatgtagtggcgcgattttggtttattgtaatttttgttttttaggtttaagcgatttttttattttagttttttaagtagttgggattataggttcgtgttattacgtttggttaatttttttttgtattttttgtagagatagagtttcgttatgttgtttaggttgttgtttgttttattgagtaaattatttttagtgtttagaatattgttaggtatttaatgtttattggatgaatgggtagtattagtaatattttgttgtatttagttataaataagatttttttttttatattaggttaaagttttatgaggatagggaatgtatattattttggatttttaataaatattgattgattagatgagtaatgaattatgtgaaaataaggaggtgaaaatgagttggttatgtttgggttgaaaattagttataaggggtcgggtacggtggtttacgtttgtaattttagtattttgggaggtcgaggcgggtagattataaggttaggagatttagattattttggttaatacggtgaaattttatttttattaaaaatataaaaaattagttgggtatggtggtgggtatttgtagttttagttattcgggaggttgaggtaggagaatgtcgtgaatttgggaggcggagtttgtagtgagttgagatcgtgttattgtattttagtttgggtgatagagcgattttgttttaaaaaaaaattaggtataagggttgtgtgcggtggtttatatttgtaattttagtatttttgggaggttgaggtgggtatattatttgaggttatgagtttaggattagtttgtttaatatggtgaaattttatttttattaaaaatataaaaattagttgggtatgatggtgtatgtttgtaatttttattatttaggaggttgaggtataagaattatttgaatttcggaggtagaggttatagtgagttgtgatcgtgttattgtaatttagtttggacgatggagtaaggttatattttataaaaaaaaaaaaaaaagaaaaattaggtgtaggaaataatttgtggtaaagaattaaaataagtttgggtatagtggtttacgtttataattttagtattttgggaggttgaggtaggtggattttttgagttaggagtttaagattatttagtgtaatatagtgagattttatttttataaaaaataaaaaattagttaggtatggtggtgtatgtttgtagttttagttatttaggaggttaagggaggagtatcgtttgagtttagaaggttgggttgtagtgagttaagattttgttatagtattttagtttgggtaatagtaggagattttgttttgaaaaaaaaaaaaaaaaagttagatgcggtggtttatatttgtaattttagtattttgggaggttaaggcgggtagattataaggttaggagtttgagattagtttggttagtatggtgtaatttcgtttttattaaagatataaaaattagttgggtgtggtggtgggtgtttgtagttttagttatttaggaggttgaagtaggagaatcgtttgaaattaggaagtggaggttgtagtgagttgagattgcgttattgtattttagtttgggtagtatggcgagattttattttaaaaaaaaaaattaaaatagatgagaaagaagttattataggatgagagatggtattataagagaaagaaagagtttggttgtagaaaatgaaatttatgtgataggaaataagttattatttttttgttataaataataaataaatttaatgggaatgtttagtggggatttattttttgaaatttttaatttgtgggattgtggtttttagattgtagtgtttatttaggaattttagtagtttttgtgagggtcggttaattgttagttggtgcggttttattcgttttttttgtagggaaaaggagatttagggtaggaggaagtatggggaaagtatgttaataggaagttagaagtttgggaagggaatagaatgatatgggaatatggggggtgggaggtagggtttttggaagggtttagggtaaaggagtttttagtttggatgaattagtgaagaggttagtgatatttgtaatatatattggaagagttttcgtttatggttatggcgttgtatagatttatggatgtaaaagtttaggatgtaaagtggttttattttattatgagttttacgattattttaagagagaaataataaaaatgttttaggaatttcggtatttttgttgttttttaatttttagtatttttgtttttagaaattaaggtatacgaatttttagtatttaataatatttattagtataaagagttttttgtatttaattttgatgaaattaataatggttttttttttagttttgtaggacggggaaaataatgaataggttagtggtatttatttgtaagagatagttaaagatgggggaagggttgaggaaggaaggaattaagtatgggatggaagagtatgtggtatttacggtcgggttgaattgtttttgagaatataaataatatggcggttattttgtatttttgatgtattagtgataggagcggaaagattttgggtttgtagggaagattaagttagattttttgtaagttttttcgaaggatttaggttttttttatatattatttttatagaggttttttttttattttatttaaaaattttttagtattttggtagaagttttgtttagtttatttataatggttataatttgttgttgtagattaatattagagaaagagaagaaataaagagttagatatttattaaattagcgggttttaggtagttagttttgggaatttgggttataattttaatttaggtttaatattgaaggttttttgtttttgtttgggagttttttaatttgattttttattttatttttttgaaatttaaatttttgttatattttttaaggtggtatattttttttttttttaaggttattgtgaggaagtagaaaggttaggttaattatattttttgattgggatattttgggttcggggtgaaaggttatagatttaagcgttgattaattttattaggtttagggttagaggttattaaaaaggtaggtttggatattaaaaggggcgattattagttagtgagaagggggcgtggtgtttggattaggtttggagaggaatcgggagaaaagggttagagggtgggtttgagttgttatcgggtcggcgttgtggtttcgggtcggcgggttgggggttttaggtgttggtttagtatcgtgattcgtttcgggaatagcgcgtttatatcgaacgggaattttatggtttattgtgcgcggtcggattcgttttatacgacgttattttcgttttttttttcgtcgtatcgtttttcggagtttttatttttaggagtttcgtttgtagattttgttttttagcgttttggtaattgatagggttttcgttttttttgttaaattagttgtgtttttagtagtgttatttttttttatttttgtattttacggtagtgagtgttatggtaacgtagttttttttggtttagtgttttattgtttaattttttaattttttagtgaatagtgggttatgttgtggagtgggggtttataaggtattttgatagagtggtatagttgtttattttcggtttttagttttaggcgttataggtaaggttggtttaagtttgattatttatttttttatagtattatttaattgtttatatgaaaagattattatttagtttatttttcgttaatggtatttatcggaaatagtttaaagtaaattagagatagtagagttttattgtgtaaaagttgagttggtagaagtatgaaacggtaataatgtttagtttagtttatttatttataatatataggggttggggttttttatatatatttgtattattcgtttttagttttaagatttatttttattagtaatatttattttttggatttgttattggttataaaagatataattttttagggtgatattttattatataaatttatatatatattattttttagtttttttagttttttttttagtttttttttttttttttgagatagggtttagttgttatttaggttggagtgtaggggtgtgattgtaatttattgtaattttcgttttttgggattaagtgattttattttagtttttttaatagttgagattataggtgtgtattattatatttagttaatttttgtattttttggtaaagacgaggttttattatggtgtttaggttggttttaaatttttgggattaagtgattagtttattttggttttttaaagtgttgggattataggagtgagttattacgtttggtttttttttttagtttatagtttttatagagtattttgagggtttgtttgtttagtggaggaggttttcgttggtgttttagggggtattttgggtattgatttaggtggggggttattttttttttggagatgattttggtaaagtcggcgaaggcgagatagtttttttttcggtggttgtttttagttgtattatgggtattaggggttatttgagattagggtgggggttggcggagtagtatttatagttttatgagaggtattgaagttaaggtttcgtggtttaatttgggggatgtggtaaatgaggagatttaagggattaaaaaagaaaagaaatttaagaggtaatgaggagggtggtttagatgaagtaagaaaaaggattataaagggaaggattagttagagttattaggtatatttatgtatgttgtatattgtaaataggtgatcggtttagagggtaagtgtgggttgatatattgttggggtttttgtttataaagttgtgtagtgttgaataaggattatgaagttgtatttgttttagtagaggggtatattttttattaatttatgtagtagtgttatgtagtttagggttagatatttatataaagaattttttaaggtattgagattagtagttgtaaaataggagggaaaaggatggaaagataaagaataaggagataggataatgataaagtaagatatttaggagaaaggataggggataatgtaacgttaggaagaatatgttgggtgttattattttgaataggtgtgagtatttatatttattttttagttttaagttattttttttatatttaaataaaattgttgtgtgtttcgttttatgtttattatgatttttggttttttggatggtttgggttaatcgtttgtgttgttttatatagatttttgtggggagaaaaatattttgttttttaaggtatagtaaataatagaatataattgtttttatatggtgatagaggggtagattgggaaggattggttttatttaatgattttttttttttgatttttttatggattttagtttttttatttgtttaaaggaaagaattttttttattttttggagagttgggataaagatttaggagggtttagttattatagagaagttatttaatggtaaaatttttaagatagggagaatataatttaatgggtaagtgtggttaattagagggttgagttgaataatttataaagatttaataaagggaaaagagattttagagttggggaaggtaatttgagagagtaataataatagtttttttagtttttatagtttgattataagaaatttttgataaattgaatattgattgtattgttatttataataatggtgaatttagattattttttgtaaggttaggtacggtggtttatgtttataattttagtattttgggaggtttaggtgggaggattatttgaggttaggagtttaagattagattggttaaaatggtgaaattttgtttttattaaaaatataaaaaaaattagttaggtatagtggtacgtgtttgtaattttagttatttgggaggttgaggtaggagaattgtttgaatttaggaggtggagacggtagtgagttaagattatgttattgtattttagttttgggtgatagagtaaatgagattttatttttttatttatatttttttaaaaaaaataaaaataaagattagtttttgtcgggtacggtggtttatgtttgttattttagtattttggaaggttaaggtagttggattatttgagattcggagttcgagattagtttgattaatatggagaaattttatttttatttgtcggatatggtggtatgtgtttgtaattttagttatttagggggttgaggtaggagaattatttgaatttgggaggtagaggttgtggtgaggtaagattgtattattgtattttagtttgggtaataagagtgaaatttcgttttaaaaaaaaaaaataataaaaaattattttttgtaaatttgttttgttttagagtaggggttagtaaaatttttttgtttagagttatatagtaaatattttaaattttgtaggttttgtggtttttgttttagttatttaattttgttattgtagtatggaagtaattgtagaaaatatgaaaataaatggacgtgatagtgggttagatttgttttgtgattgtagttagggaataaatataattttgaattgttaaatttacgattttaagtttggaaaatttaatttaattgataatgatataaaataatttatgtgataatttgtgagaagttttttgtaaaagttaaaagattttatagaaaggaattaattattgtttattaattaaaaattatatttagatagtttgtttatagaagtatttgtttttttttttttttttttttttttttgagatggagttttatttgatgtttaggttggagtgtaatggcgtaatgttggtttattataatttgtgttttttgggtttaagcgatttttttgttttcgttttttgagtagttgggattataggtatgtattattatagggtttttttatgttggttaggttggtttcgaatttttaattttaggtgatttagtcgtttcggttttttaaagtgttgggattataggtatgagttattacgtttggttgtatttgttgtttttttttgtttatatttaattattttagtttttagtaagttaagatttttaaaaggtttagttagattttttaggttataagtaggagttattgaataaatatttattggttaattatataaataaggtatgttataaggaaaagttttttggtggtgtagggatgatgggttaatttgtgtatggagtatagaagatgatattcgtgtgggcgtagataaattgttttaagagttttacgttttgtgggggaaagtggtagagaaacgtgaggaaaagaggtagggagagtagtaggatttttggatatcgaaagtatataatttttatatatttatatggattatttttatttttttatagttttttagatgttatttttttttatgttttagtttggttttattaatttattgaatttatttttgtatattttatattttgttattgtgtttttatagaaattttttatgtagaggttaagttttttttttttttttttttttttttttgagatagagtttttttgtgttgtttaggttggagtgtagtggcgcgattttagtttattataattttcgttttttaggtttaagtaattttttgttttagtttttcgagtagttggggttataggcgtttgttattatatttggttaattattttgtatttttagtagagatgcggttttattattttggttaagttggttttgaatttttgatttggtgatatatttattttggttttagaaagtgttgggattataggtatgagttatcgcgtttgggttgtagaggttaagttttaacgttagtttttaggtgaaaaattggggttggttattggaaattttagaaattatttaaaaaatgatattgtaatgtgtatgtataaataattaatgtatttaatagtatgttgaatataatttatatattaagaataattttataatttatatagaatttttttttagtaaattaattaggaaatgagatttttgaaaaaaaagtaggtatattgtagagtagaatgtaagtagaattatttatgttattaaatttgtaatattttttttttttagttatgtaattaattataatttttgttttgttttgtttttgagacggagtttcgttttgttgtttaggttggagtgtagtggtgtaattttggtttattgtaatttttattttttaggttttagtgatttttttgttttagttttttgagaagttgggattataggcgttcgttattatatttagttaattttttttgtatttttagtagagacggtgttttattttgttggttaggttggttttaaatttttgattttaagtgatttatttattttggttttttaaagtgttgggattataagtatgagttatcgtatttggttataatttttttttataattaattatatgtaattgaaattgggaaattatttatgggatttttaaataatttgtgttagaagggtttttattgtagttaaatatttttattttttgattgttatttaaatgttttattatttttttgatgattagttatatagtttttgttttaatatttttgttgtaagtttagaagaatatttttttattatttgttttattgatataatgtttttaaattttttttgttttgtttttttttgaggagttttattttttcgtttaggttggagtgtagtggtgtaattttagtttattgtaattttcgtttttcgggtttaagtaatttttttgttttagttttttaagtagttgggattataggcgtttgttattatgtttggttaatttttgtatttttagtagagatagggttttattacgttggttaggttggttttaaatttttgattttaggtgaagtatttgtttgggttttttaaagtgttagtattataggtatgggtcgtcgtatttagttaatatgtttttaaattttttaaggagtaaattttgttttttttatatattgaaggttttttgaaaaataatggattttattttgttttatatatttgttttttagttttaggtgttagtatggtattgaatattgataaggaaataaagaaaattttaggaagaaagtgggttaatatatttggtaataattgtaatgaatataaacgaatttttggatattggtttttttattagaaatagttatttcgttggttgggtgtggtggtttatatttgtaattttagtattttgggaggtcgaggcgggtgggttataaggttaggagtttgagattagtttggttaatatggtgaaattttgtttttattaaaaatataaaaaatagttgggtttggtggtataagtttgtagttatagttatttgggaggttgaggcgggagaatcgtttgaatttagaaggcggaggttgtagtgagttgagattacgttattgtattttagttttggtaatagagtaagatttcgttttaaaaaaaaaaaatagttattttttttatttgttaatttagattgtaaattttataggtataggataaaatttttagtataatttatagtagaaggtaaaaggttggagggatgtttttataatgttagaaatagttattataaaacggattgtagggttttttggatatacgaagtgtggggtatttatagtaatttttttggtattgtaaaggggtttttaatttttatttttttttttaatttttttaattttattttattttttttttgagacggagttttattttgtcgtttaggttagagtgcggtgatgcgattttagtttatcgtaagttttgtttttcgggtttacgttatttttttgttttagttttttgagtagttgggattataggcgttcgttattataatcggttaattttttgtatttttagtagagacggggttttatcgtgttagttaggatggttttgattttttgattttatgatttatttgttttggttttttaaagtgttgggattataggcgtgagttatcgcgtttagtttttaatttttattttttttattttaaaaagaaaagattttttttattttaaagttaatatgtaatttgtgatttcgatagatggggtagggatttttaataattttatttcgacgttgtagagagaaaaaaaatagtagttaaggatgtttaaatacgttagaaaaagtgttgttgttattgttatttgtggttttttcgtattttatattttatttttagaaatttataatatatgtttttcgagttcgttgtgggggtatattatttttgtggttgcggcggtagttagtttagacggggcgagaattatatcgtttttggtattttgaaatgaaagattatataagttatttttgggtgggagtgtagtgggtggttttgtttatttattttaaattttatttgattttttttttttttttttagaggtattttttgattttagatatttttagggtttatttttataaggagaaatgggaattgaggataaagaattttttttagagggagttttggtgtaaagagtttggaggggaatttataaaggagaagaaaaaaataaaagaatgagtttaaggaaaggattaaattgttttgtttattatattttggaaaggaggaatgtatatatattgtattaatggaatataataggaatgtatatgtaagttaagtatttttgttgggtttaaattgatataaattaataattattttttttttttataattggattttgaaagaaaagttaagttaggggatatatgtttaaaaaataattttattttagaagataaataaaaagtttagtataaggtcgggcgtagtggtttacgtttgtaattttagtattttgggaggtttaggtaggcggattatgaggttaagatatcgagattattttggttaatatggtgaaattttatttttattaaaaatataaaaattagttcggcgtggtggtatgcgtttgtagttttagttattcgggaggttgaggtaagagaattatttgaattcgggaggcggaggttgtagtgagttaagattgcgttattatattttaatttggtaatagagtgagatttcgtgtaaagaaaaaagaaaaaaaaatttagtatataaaaggtatttttgttttttggaaataaattgattttggtggaagaataaagtaagaggaaggatatttaggtttttggaattaagatgtgtggtggggaggggatgtagaagataggtgagtttttaaattaatttaatgaagttattgagttgtttatttttataaaagttgaaggttaatattttatagggtagaataaatttgagttttaacgttagttttaaagttattaaggttgttattatttttgtgttgatttttgttattattttttagttttattttagggagtggtagttgggtaagtttttttattttatcgtgttttattaagaatttttagagaggtgagtatataagattggagggaaattttaatttaaaggacggagttaagtttttataatttcgataagaaattgatttaataaagagagttgagaaattgtttttaggtcgtaagaatatattttgattttattgagaaatagtaaggttggtagaaattgggatttttaatttttttaaggatattttagagtaatatagatttagttattatttgtatagttaatagttggttgtggcgttcgtttggggagtatatatgttatgttaaaattgtaacgatatagagattagtatggttttttaattagttaaataatttttaaaaagttggttatgtatgattgagggtggataggggttaattttattatttaagttattttattgaaatggtattttggaaaaaggatgatatttaattttggcgtttagttttcggttcgggattagaaaatgcgcggggtgtggggggggggttgtaggaagtattgtttagatagttaagatatacgtgggaaggtttttattcgtggatttttgatagtggagcgataatttcgagaaggtataattaatttgaggttgtgtaaaatgtttttcgaagagttatttgaattttgtgagaatttcggaagagagatagtataggaagtcgttttagtacggtgtttaatatagacgtcgttattttgacgtacgtttaggataggaattgacggaaaggtaattgcgtatgttttaggaaattgagtagggtagggttaaggataagttcgtagtgcggaaggcggttttacgtttgcgttaggacggaagcgtgaaagggaaggtatgggggagaagttaattttaattgcgttataatcgaattagattttaaaattgcggttttttttggttagttattacgatttttagatcgtattgttaaagtttgttttttaagtaattttgaaggcgatttttagcggtatttttttagtgcgtatgcgtttttaggtttttattaattttgggtgagaaatgttttttagggcggaagtggcggaagtagaggaaagggaggtgttaggtttttggttacgcgtacgcgatagggaggtaggaaggaggcggaagagagtgttagggaaaggggcggagtaaaggtgaagtgagagtagttaattagttggcgagttgttatttgggttgattaatgagtttacgtttcgcgtataatgtttcgcgataagggcgttttattagtacgtttgggcgcgttgggcggcgttcgggtataaaagattttattcgagcgggcggtcgttattttggggttcgtttagaggtaagtttgtttattttgtcgtttagtgggtaaaattttgcggagagcgttggatttgggaagcgggatagggatggatgggtttatttgagagttacggtttaaagcggttgcgattaggatgggatataggtttgtttggggataataaagatggtatttgtgagtgttttgaagtaattcgtattgattatattttttttttttgtgttttttttattttaggtttgaattttttcggagaaagataggtcggttacgaggaaaatagaaataagtcgtagtaatatttaagtttttgaaaggattttgagagaggggggaaagggaaaatagtagttattagtttaattatttgtgttttttgtttttttttatttattttgtttattttattagtttacgttgtttgggatttgaaatttgtggtcgaaggatcgttattatataattttaaaaataattaattattttttttttttaaattatttaaatttatttatttagcgtttatttttttgaatttatttagaatttttttttgcgatttttttttttaaatggagttgggtgggggggaaatgaatattgagttggtttttattttttaaaagattttttgatttaatgaggttttttaaataattgagttttgggttttggttggttgttttatttttttttttttaaaattttatttttttttttttgagttcgaggtgttgacgtcgtaaaaaaattggatagtaagtgtcgaatttttaaaaattagttttgtaataagaaattaacgtttttcgttgtgaaattaaaaataatgagaggaagaaatgagattatagaataaatagagaattggagaaggattaatttggttatttaatttttattaaaaagggtttgtgggtttaaatagttttgtttttttttttttattatttattttttttttgttttgttgtaggtaaagagagggtggagggagggttagtaagtgaggattttgatggttaatttttggtaatttagttaatttttagattgttaaagttatatgtgtttatataaggaggaatggttatttttttttggttagtagtagtttttaaaagggttaatgagtttatatataagagatggtggattttgtggtttagaagtattatttttttgtgtgtgagataagtagggtgttttttaatttgttagattaataagtaatttgtatataaagattgtagggtaaggagatgggtagagagaagtaatagttcgttataattttttaaatgattgttaaatttttttaattttaatgtaatttgtttggggtatatttgtgtggttaaaataggtggtaatttaggaataaagattgtaagatatttaggataaaatataattttagtgttagtatatataagataatagttggggaggtaaagaatgttttataattgttgtagattgtataggtatttaaaagtaaaagagtgattaatattttaatttgatattttttggtgggggaggtatagttaaatagagggtggaaaggttgggaaatgtggaatttaggagtataattttaaaagttatttagtgtaattgaatgttagttttttaaaagatttgtgtcgttaaaaggaattttttttttttttgttttaatatggcgattttttttgtttttttgttttttaagcggcgttgtaggttgtgttttgatttatttttttttttgtttttttattttaattttatttgttgagaggggtttaagttttttttttttttttttttttatagggaggatgggggtggtcgatggtagtcggttgaattttcgttgtaaatttagtttttttttgtagaaaattgttttttttaatattttaattgttttaatttttattacgtttttattgattaaaataggttaaagattatttacgatggggaattggtttttgatttttttttttttttttttattaaaaaggtgttttataatgtaattgaagttatcggtagagtcgggtggttttttagtttaagttttttttttttattataaaatggcgttttttcgtttttgttgttttttttttttttttgttattttgagtttagggtcgttttagaaatttggttaagtgggaggagtagttttgaaaggtgatgtaattagtttttttttttttttttttatttttttgaagttttatttttgagtagatgtttttgtattgtttgtgttcgttgttgttagggagaagatattttttttatttttattatataaaatattttaaagggataggagtttataggaattaagtattaaggttgtttatttttgtgtagttttagtttttatagaattagtttttatttttatttttttttatttattataattgtttgtaatttttttttattttagttgttaggggtgaaaaaataggtaaatttaagattgggaagttttgaggatgtgtgtgagcgtgtgtgtatgtatatatgtgtgtagagggagatgggaaagatataagggtttgtaagagtaatttggagataaacgggtttaatgatattgaagtgtgttatttttgtttaggaattagtgggttttttgtatttggtcgttttgtgtaatgagaatcgggggaaggtgggtatttttaggatttttttttaaatcgtttttatttttattttttagtttggggataaattgtatttagtgttgtattacgttttgtatttgattagtttttgtatattggtattaggataagaagtgaatttttaggaaaggaggcggtagttgtaaatttaaggtagggggaattaagttacggtttttggtaagtaaaatttttttggtattatattttataatttttattttttttttttttttaaagagttattttttttgaattttttttttttttttttttaaaagaaatttttaaaagtattaatgaaaaaatgatgttttttttattttttaatttatgtagtgttgtggtatttggtgtatgtttagaagttatgttttatttgagggtggtattgggtgtttggtttttttttttttttaaattttttaaagttaaatttttattagattttttatataattttaatttttaaaagttttgtattgaagcgtggaggttttaggtagaattggaaagtataattgttttttggtgatttgggtgagatttagggttaattttttattgggtatagatttttaaattattatttaagtttttggattggatgggagggattttttatatgtttgttgattataagttttttttgttttgttttgttttttttttttaagtagtttgttatgtgtttttgtagtatattttttttgggagttgaatattttatttattggggtttttgatttttagtgagttaggggattaataaagaagattttttttaatatgggagatgggaagttaggtttattaggggaattatatttatttagaaaattttggaaaatttgatttttgtagtttgtggttagagttttagtttggggtttttttttatgagttagggtggtatattattttgtatttttattggaaggtagataagtttttgaggagtttatgtattaggtttgtaaaatgattgaggggtaggggtttattatttggaagaaagttatgattttgtgatgaattatttgagagatataatttagtttattattgtgttaaattaggaagtgtttaaaatattgaagaaaggaaggggaatataaggggttaggtataaattatttttatttttagaagtgtttttaaattaaggtaaatttgggatttttttttttttttgttagaagatagttattttttaaagagttttgatttgtatagaatttttattttgaattaatttagttttgttttattggtgatgggtgtggaataattttagttatgttggatatttttttattttatttaattgaataatttttaagtaaaatttattttgaaggtaggagttggtgttatagacgtttatttttggtaaaaatggtagaaaattttttaatgttttgtgttagtagagtatggttttgtttgaaatattttttataaggaacgtatagtttaggatgaggtggaggtaggttagggggttgttattttattttttattttttgtatgttttgtagttaagaaaatagtagtttattaaaagaagatataattatgtcgtggattatttgtggttttagaaagtttttttaagtttttattttagattttagattttgagtaggtaatgttataatatttagttacggtttttgtttgtttttattaatttagtttgttttttttgttgtagttttgtgttcgaaatgttggattttatatttttttttatttgagcgttttggaaattgtttggtttttttttaaaatatattgattttaaagtaaggaaattaggttataagatatttggggtttttaattttaaataagaattaatttttttgaaggaaggttattatgagaaaatttatttatattttattaagattggtgtttatgagataaaattttatttatatttttaaaatataagtagtggaaaatgaatatttaacgttaattttgttttgttttttagtttttttttgattattaatgttttttatttttgtttatatatgtgggaataaaaaagtttttggattttatttttagtagagggtattggatagaatttagttttgtatttattggtttatttttttaagattggttttttttttttgttttttatttttttaaggaatatttgagtttagatgatagtttatttagtgtttgaaggaaataggggtagtaggtttatttattggtttagtttgtagttggatatgtaaaaaggaattttttagggttatatatatttaattttgggtttgaattagttaagggtaattggtttgaaatgatgtttaatttaaggttttttgttaaattgtatatattttgttttaggaatttaatggtaggtatgtgtgtatatatagagagagggagttttaaaaattttttagttttttgattgtttatgatatgttgttattggaatttatatattgtttttttagtttttaatagatgtgatatttgttttatgtgtttttttatcgtatttttttatagtttttatagattattttatagtattttattatatgggaagaatatttttatttttgtgtttgtttttgtgtgtgtaggaattattatatttgagtggatttggtttacggatatttaattttttttagtattttttttgaatgttttttttttgattttaggttttatttgtatttgtggaggttttagggtagtagcgattttttaatattttttgttttatttttttttttgtttagtttataggttatgatttttagagttaagattatatttttattttttttggttgttttttttttgtttttgttgttgttcgtttaggttgttaggatttatatatttggaaatttattgacgtttttgttgggaggataaaaaggttgagattgttatgttatgtttttttttttgtttgagaataagtagaattaatttgtattattttataagaaatttgtgtttttttcggtataaaattatttatttttgtaaaatattgatttttttatttttttgttgggattgtgtttgttatttttgtgttagatgtaggatgaggaaggttttgtttttgttttttttttgttatttagtgtgggttttattgtttaaaggtagatattgttgaagtggtttttttttttggtggttttttgtttgtttgtttttgaggtagcgttttattttgttttttaggttggagtgtagtggtataattatagtttattgtagttttagtatttttgggtttaagtagttttttcgtttttttacgttagtttttcgggtagttgggattataggtgtatattattatattcgatttatgttttgtagagatgaggtttcgttatgttgttaaggttggttttaaatttttgcgtttaaggaatttgtttattttggttttttaaagtgttgggattataggtatgagttattgtatttagttttttttttgggttttagaagtaagtatttagaggtagtgtagataaaaattttaattagaattatattgattttaaattatttttttggaattttagttttggtttgttttttttataaaaggagtttagtttttaattaattttttttttaatttggtttaaaatagttgtttaaaagggaatttttttagtatttggttttatttgttttttttttaggttttatggtttttagttttaggtttttttaggggattttgtatagcgtgatttttgaggagaggattagattcgtatttttgtttttgaaagtataaattattagtttttttttaatttagagatagtaaaaatttgtgtagtgtttggttaatgagtgatagtttatttaaggtttaggaggatttgtttgatttttatgtatttatttgttttaatttttggtatttatttttagatttttttagggagggattttgtttttaagttttgttttgttttttattatttattattttagttgatatatattttgttatgtgtagtgattatgatttttaatgggttaagataaaaaggatttaagttttataagatatttagtttaaatatttaagattggtttaatttttattaagttataggttgttttttaagttaaatttattagtaattagggaagataggatttaacgataggtgtaaatgttttggagagttgaatattttgttatgggaattgattttagttttaatacgatttagtgaagtttagttattttaggaaggatgttgttgggagggagggataggtgtgttgttttatttttttaatcgaattgtttttttgtttagttatatatgttttttatgtttaatttgttagggttatttttttagtagtggtaagtggtttgtgtcgattttttatatttaaaaaatagtatagttgaataattagttattatattttgttaaatatagagatgtggtttattagagggtttattcgggtagtttttgttatttatttattttgtgggtttgtttgttttgtttttttattatagaaattattattatgggttcgggttttatagattttaaagaattttttaagggtttggatagtttttttaatcgagatggggaagttaaaagtgtggatgggatttttaagatttttaggtgagtttttatttttttttgtatttattgtgagtagagaatattgtgtgttaaaatatggttgtagttgaggtatattggaatgattttggaaaggaaagggaaagatagttagtgtaataggattaaaatgtaataattttaggataagggataggaaaagatgattatttgtttttgattataatggaaattggagatttggacgtttacggttttaagggagttatgttttggaatgagagtagggtagtttggtaatagaattttagattgttttggttcgtgttttatttatttataatgttatttttttttagggatttttaggttttttaggggagagtaaataattaagttagttttgaatagattattagggatagttgttgagggatagttttattatttggaggtagaatggaatttattttgtgtgttacggaggtagcgatgtttttttttttaggttagagattgcggtgtttttgtttttttataagtttttatgttatattggatttattttatttttttagaggtatatgtgattttttttttttggagtaaagttttaagttattaggaatttttaggtagtttatagagaggcgtttttgttaagagaagagatattggttgttttatttttaattttaatttattttttgtagtttgatgaaggaagtacgaaagatggtgagtcgatgtatttatttgaatatttttttgtagattcgtttattagaaatattggttaagtaagtggggatttggatggttggaatgggaaggtgtagcgaaaagatggggcggtgaggtatggggtttttgggttattgatgggagattgggattgtaggatgtggtattgttaaaatttagaaagggtattattgatagatttttttgtttgtttgtagatttattgacgttggcggttataaattttttaataattggttgacgtatttaaagataattaataatattttttttttttagtaaattttattgattttgtagtatttatcgtttattgtagattattttaagtaggtatttttagtttttaaattttgatttttttttttttggtttagtttaatggatgaaaaatttaaattgattgatgtggttgtaattttgggtttgtgaggtagaatagtagaaaaaaaataggaatttagaagaagaagatttggtttgaatttattttttttaataggtgtgtggcggttgggtacggtggtttacgtttgtgattttagtattttgagaggttgaggcgggcggattatgaggttaggagattgagattattttggttgacgtggtgaaatttcgtttttattaaaaatataaaaaattagttaggtatggtggtatgcgtttgtagttttagttaattaggaggttgaggttggagaatcgtttgaatttaggaggtggaggttattgtgagtcgagatcgtattattgtattttagtttgggcgatagagtgagatttcgttttaaaaaaaaaaaaaaaaaaaggaatgtgttagttaggtgtggtggtttatatttgtaattttaatattttgggatgttgaggtgggtggattgtttgagtttagtagtttaagattagcgtgggtaaaaatgataaaattttgtttttataaaaaatataaaaaatttatttagatgtggtggtgtatgtttgtagttttagttatttaggaggtttaggtgggagaattatttgagtttgggaggtcgaggttgtagtgagttaagattgcgttattgtattttagtttgggtaatagagtgagatttcgttttaaaaaataaaaaaaaaaaaaaaagtagggaggattgtaatttttgtcgtttttagttttaagtggaattatttgttttttggtatttatttttttgttgtttttattttttatagaataatatagttaaattggtgaagtagttgagtaagttaagtgaggatgaaggtagggtgttatttttgtttttttatgggtttttttttattatttttatttaattattttaatatttttttttatttttggattgtttttttatttttttttttttattttattttgtttttttttttttttttaaagagaaagtttttttaatttgtatttttttttttgtttttaattttaaagttgtttatttttttgttgttgaatataaggtgttatattttaattggaagttgatttttaaaattgtttgttataaaatatatatatttaaaatttgttgtgggaaatagtattattttagcgtgttttatttgtgaaatttttattattaaatgataaattatgaaatgagtttataagtggaaatgttggttagaagagaggtgttatagattagagatgttatttgttaagtataaaaggaaagagttataaagtatttttttatatatttagaaataaattttatttttgtttttatatttataaaggaaaataaaaagtttttagattgttgtaataattaggtgtgttatatataaagtaattaacgtagttttttaaaaaaatgttagtttttgaggaattggtggattttggttatatgtataagttttttaatggtgatttttgagattttggtatatttattatttaagtagtgtatattgtatttaacgtgtagttttttattaatgtagattttaattatatattttgaaatattaggtttttttattttagagtggtgtgatgatattagagttgaaagttatttaagtagaatataattttaatttattgttttattttttaagggtttggtttttaagtatattttatgttttttttaaaattttgggttatttttttcgttatataaatttttataatatttttttaaattttttattttttgtttttggaagaatgttattttatattatttaggtattttttttttttgttatttgtagagtttcggaaattggttttagtttttgttagcgattggatggttgttattcgtttttagagtagtatttagtttgttggtaagttttttagttttttattttttgtatttattttttttttattgggatgtggtttttaggtgtttttagtttgttttatttttgatagtgtttatttaaataaaatttttttttgttttgtttttttataatagagaaagataagaagaaacgtaaagatgaaggaaaaagtcgaattattttttttgagcgatttttgatagaggtgaaggttgagattcgggttgaggaggttttagagaagaagagggagaagtttaagttttttcgtattatagtatttagttatgttaagtttcgttttattggtaagattggcggttggtttttggagggtttatgggtatgtgtatatttagagttttatgggggaattatttgatgtgtggtatgttaatcgtaaggaagagggaagattagtagaggaagttttggttataaggttagaagaatatttgcgggtgagaacgggaggaaaattcgggggtttggggtttgagtttagttgtttatatcgtgtttttttttttaggattagagttggagatattatttttggtgtttgtgaagaagaatgttagtatagtggtggtttttgataagtataattttaaatttattttttttaaacgttagaggtatggattatatttttaggttttgaatggggtggatttgtggatataagggagtaggagggggtgagtcggagatgttgatgatagttttttttttgatagtaacgtagttgttttaggagatgttattttttttgtagagaagaaatataagttatttaatataatatttaatgttattaaagagattaaagtgaagattatttcgttatagcgtgagtttaaagtggggaagatgtattttgaattaggagtaaatttttttttttttttttttggagatagagttttattttgttatttaggttggagtgtagtggtacggttttggtttattgtaagtttcgtttttcgggtttacgttatttttttgttttagtttttcgagtagttgggattataggtgttcgttattacgttcggttaattttttgtatttttagtagagatggggttttattatgttagttaggatggttttgattttttgatttcgtgatttatttattttagttttttaaagtgttgggattataggtatgagttatcgtatttggttaggagtaaatttttatgggaatgaatgtttttgggaacgagaagttttttttttttttttttattatttttttttatttttttttgattttttggtattttttattttttgtatttttggaattttcgttttaggggttatttaggagtaattttagagataagatagggacgtgtgttattttgtgattggttaggggtatttggtaaggtgatttgttatgtttataagggtttatttcgttagttatttgagttataatttatatttaaagttatggtttgtttgttatgagaaatttagaataataataagaatattttgtgtgaatttttttgtatgtgttttttggtttttttgagtttatcgtgttttaagttgaggtagggtttttattggtttattttatgtttggattgtgtttgtaggtgtaggattatgaaggaggtttgatgatgttatttggtgttttttttttttgtagttatggagggtttgggttttttggatgtttttaatttagtttttgttttaggtattaaaattaagaagaaaaaaaaagtattgttatttacggttgttaaggtatgggtttttagaagtaggttttagtgatagagtataaaaggtaaagtagaagaaagggtatagtagttaggagttgtcggggaggataataagaggcgttttgttttggatatagattggtgtaggtgagatattgtggagatagagtttttttttatataggaattgttgggggattgtgtttgggattttggattaattgttttgtttttggttttttagttagtttattaattttttttttttttataatagttaagtttttttgaagggaaaacgagtatagaattaagtatagttaaatttttttttttagaattagtattattttttgaggtaatggacgtagatcgtttaggtatttcggttttttttgttgaagtttcggagtttatggatataggtaatttagaaattggtttagtttggggggttttttgaaaggagggatttgggtttgaaattttttttgtttttagtttttttggagttaggagttttggatgttaagttagtggagagttttggagattttaattaattgattcggaaaggtaggaagaggaaaagtgtgatatggtttgaggaaggtaaattgagagaatatttttattttgaattggatgaaattgaacgaggtaagaggttattttttacgtaataggtgtgtttaagggattttgaaaggatttggttgtgtttatttttttttttgtttttttttttttgtcgatagtaaatgtgaataagattaaggattttggtgaggtcgttaagcgagagatattgttagatcgatatgtatttgagatagcgcggcgtttgagttatgataatatggaggagaaggtgttttgggtgtgttttcggtttttggttttgtttttattttttgttatttttggaagtaatagttaggagcgatatatttaggttgagcgggagaagggaattttttaggagttttttttgaataaggagaggtgagtagagtggggttcgtgttttgggatgttgagtgtttggatatttttgagggaatatgagttggggtaattacggggtggaggttagaaattatttttagggtttgaattaataatttgattattattttttttttttttatttgtgttgtttttgatagtttttatgagtttgattttgagttttacgagtttatattttttaaatttatttttttagatgaggtaagttaatgttttgtgatgatggaagttgtgatggttattgaattcggtgtattttttatatgagaatgtttttgttttgttagttttgattttttttgttttttttttaggagtgttttatggatgagatttcgtatgttgagattttggaatttggggggttaggtggtttatttgatggggtaggaggttttaagttgtttttagttttggttaattttatgggaagtatgggtgttggaaagggtttttaaggttttggaggaggaggtattaatgtttaagagatttttatttttattatggtacgtattttttttttttttttttattttttgtggagtttttttaagttcgttttttttattgttttttattcgttttattttagttttttatatttatttatttatttttaatttttggcgttatttttcgttatggttgttattttttttgtttgttgattttgtttttttatatttttatagggtagtttaaatagttattttttagaggaattattgaaataattagattattcggataagattaagtagatgttgggtaatttttagggttagttttaggggattgggggaggaagtttgtagtggagttgggggaagtagggttttaaagatgtagaagaatatagggttgtggttattaggtaagaaatgggaggggaagattggatagagagagtattgttttgttaggttggtttgagagggttagttggttgtatttaaatgggagattatgttagttttttagagtgtttatgttgtgttatttttgtttttattaatagtgttatatggatttttaggttttggtttaatagttaatggttttttattagggggttttgggggttttaagggtatgtagtattttttttttggatttgggggatttatgttaggtaggtggtgagtaaaaggttggaatgggtttatttgtttaattttagtttgataatagtataggattgattggaaggtgggaggtggtggtttaggttgggagatggtagtttttggtagttgatattgttttttttttttgtttttttataggtttttatggaggttttggtgggttagtgggtttacgttttttgggttttttatttttttttcggggaggtgattttttttgggatggttcgggcgattttatgcggggtggtttaatgcgggggggtttaggattaggttttggattatattatagaggtcgaggtggtcgaggaggaaacgaattttttttttttttttttttatttcgaggcgttagaggaggtcgttttggaggaggatttttaaatggacgagggggttttggtgggggtatggttggaggtggtgggtatcgtttttacgaaggttttggtgggggtatgggtaatagtagtggatatcgtttttacgaaggttttggcggtggtatgggaagtgggtatcgtttttatgaaggttttggtggtagtatgggtgggggtggaggatatcgtttttacgaaggttttggcggtggtattagtggtggtagtggttatcgtttttatgaaggttttggcggaggaatgggtgtcggtggtggatatcgtttttacgaaggttttggcggaagtatgggtggaagtggtggatatcgtttttatgaaggttttggatacggggggttttatggttatcggttttatgatgtttttggttatcgaggttatgattatcgagggtcgttattttatgagtatcgtggttatgatggttttggttacgggggagggggttatcgagggtacgatggaggttatagttatggaggaggtgaggatgttttttgttttttatatgttttttggttgttttatataagtttttggggagtgggtgagagttattattgttggtagttaggtagaacgtgaggtattcgtttttttgatgttttagtatgtatagtagtttttattttatgttttttttttaaatttttaagattgtttttgaaagatagtttttaggatgttatggataaggggtggtgagggtggtattgtttttagttattttttgtttaattgttttgttatcgtttttatagatatgttaaatcgttttgtttgtcgatattttatgatgaagggtaattgtcgttatgagaataattgtgttttttattattcgggtgttaatgggttttttttgttttagggattatttgtttgttttgtttatataatttttgtggattgtagtttcgttttttttattttgttatggtttttgtgaggtttatttttttttttttttagttgatgaggagtcggtttttttagtttttatttgtttgggtttttgggggttttttgattattggtgcgtattgatgtatatatttttttttagtttggggaggagagagattggaaacgtttttggattgttgaagaggagatttagttggttttattttttgagaagattcgttttgtattttaaatttttttttagtattatttttaatgtttgagaatttaaagttggttattttggcgaatatttttatttttttattgcgggtttttatatgtatatagaattttgatataggattagttgtatttaagaaattattttaattaagtttattattttttatggggtggggagatgttgaaaggggtattgtatattttattgtattgagagggtttaattagttggatttgagttttggaatatatattatttttattttttttttagcgtgggtttattatttttagtttttttttaagtgggatttttaattttttgtgaatatttagtttgcgttttgggtttgttaggttcgatgatggcgaattcgtatttgtattcggtgtaagttttagttggtagaggtgagatcggtggtgttggtttgtttttgttaattatagttagtttggagatttgataaaatattttagtgagattagttttttattaatttgggttcggcgtgttgggtttgaaagttatattatatgtattgtttttgggagttagtttattttttgtttttatttggaattttgttagcgtgaaggaggtttttaggtattttattttgttaattatttttgaatttttattaggcgtttttttgggtggatttaataagatgattttgtttttttttagtttttttttttattttggtattagttgttttttatgaaaatagtggattggttgggttttgtgtagggttttgggttagagttaaaatggatttgaggatgagtatttttttttttggttttgtatattttgtatattaataataaatagtggaaagagaagtagtttatttaatttttagtgtgtttggatttttttgagacggagtttcgtttcgttgtttgggttagaatgtagtggtgtagttttggtttattgtaatttttgttttttgggtttaagggatttttttgttttagttttttgagtagttgggattttaggtatttgttattatgtttggttaatttttttgtatttttagtagagatttggttttattatgttggttaggttggtttggaatttttgatttcgtgatttgttcgttacggttttttaaagcgttgggattataggcgtgagttatcgcgttcggtttggattgttttttattttttttttttaaaagttattattatttgtgttagatatattagtataaatttgtggaatttgatttttatttttttggagttaatgtttgatttaatagttgttattaagtattggtgaaaaaatgttttaaaaagtatataaaatattttaggatatagagtagatttcggttatagggtttttttttggtttttatttttttgagttttttttaatacgtttcgtgtgtgtttttagaatagttttattttggttatcgtgttttttaggatgtgtttttggttattttatttatattttatagataagggaggaaattttgaggatgttggagttagataaaggttattgttttagttttatttttttatagtttgggtgattttagttaggttagtgttgggtattagtggtttatgtttgtaattttagtatttttgggaggtcgaggtgggaagattatttgagtttaggagtttgagattagtttgagtaatatagggagattaggtttgtataaaaaatataaaaaatattaggtatggtggtatatgtttttagttttagttatttgggaggttgaggcgagaggattatttgagtttgggagtttaaatttatagttatgattgtattattgtaatttagtcggagtaatagagtaagattttgttttaaaaaaaaaaaaaaaaaaaaaaagttaggtatattgggttatgtttgtaattttattattttgggaaggcgaggtgggtggattatttgaggttaggagttggagattagtttggttaatatgataaaatttcgtttttattaaaaatataaatattagttgggtgtttataatttagttatttcggaggttgaggcgggagaattttttaaatttaggaggtgtaggttgtagtgagtcgagattatgttattgtattttagtttgagtgatagggtaaaatttcgttataaaaaaataaagggtaagtatagattgttttttttaaagtggttttggttaggtatggtggtttaagttagtaattttagtattttgggacgttaatatgggaggattatttgaatttaggagtttaaaattattttaagtaatatagggaagttttatttttttattttcgcgtttggtttttattttttttaaattagaaattaaagttgggtatgttggtttacgtttgtaattttagtattttgggaggtttatatgggaggattatttgaatttaggagtttaaaattattttaagtaatatagggaaattttatttttttattttcgcgtttggtttttatttttaaattagaaattaaagttgggcgtggtggtttacgtttgtaattttagtattttgggaggtcgaagtagttggattatttgaggttagaagttcgagattagtttggttaatatgaagaaattttatttttattaaaaatataaaaattagttgggtgtggttattggcgtttgttattttagttattcggaaggtaggagaatcgtttgaatttaggaggtagaggttgtagattgtattattgtattttagtttgggtaataagagtgaaattttatttgaaaaaaaaagaaaggatatattattttggggggagtgtgtgtggtagatatggggtagttgaagatattaatatgttttaatatgtgggttgagaatggcggtttttaagtttgttagtatttattaggattatttgaagagtttattagaaaataaatttggggtcgggtgtagtggtttatatttgtaaatttagtattttgggaggttaaggcgggtagattaggaggttaggagttcgagattagtttgattaatatggagaattttcgtttttattaaaaatataaaaattagtcgggcgtggtggcgtatgtttgtaattttagttattcgggaggtcgaggtaggagaattgtttgaattcgggaggtggaggtcgtggtgagtcgagatcgtattattgtattttagtttgggtaataagagcgaaatttggttttaaaaaaaaaaaaaaaaaagaaagaaaaaaaaaaataaatttgggttggatgtagtggtttatgtttgtaattttagtattttgagaggttaaggcggatggattatttgaggtgaggagtttgtgattagtttggttaatatggtgaaattttatttttattaaaaatataaaaattagttaggtatggtggttcgcgtttgtaattttagttatttgggagattaaagtaggagaattatttgaattcgggaagtggaggttgtagtgagtagagattatattattgtattttagtttgggtgatagagttagattttatttttattttaaaaaataaaaataaaataaaaagaaaaaatagatagattgggggtagggtttagtaaaattttgatttagtaggttaggatggatttcgagatatgtatttttaataaatttttagttgttgaggttgttatattgttttggaatacgtgttttagttgtatttttagtattggttatatgagggggtaataatgttttattagtatttgaaaggttttattgtatgtaggtttaaagtgggtagttttattttttttttgtttaggtttggtgtgtgtgggcggaggtgtttaggttagtttgttgttgttgtgtgtattgggagaagatttgagaagatataatttaaggattaggttagggcgtgaaatgttaaagaagtatatagtttaagtgaaaaaatttaaatatgttataatttagtggttataattttgtgtttttttttgtttttatttattgtttgttttttattttttttttattttttgtaataagttataagaattttaaaagagagtttaaagtttttattgtattttaagaataagttcggtcgagcgcggtggtttatatttgtaattttaatattttgggaggtcgaggcgggtaaattttaaggttaggagatggagattattttagttaatatggtgaaatttcgtttttattaaaaatataaaaattgttaggcgcggtggtttacgtttgtaattttagtattttgggaggtcgaagcgggtagattatgaggttaggagatggagattattttggttaataaggtgaaattttttttttattaaaaatataaaaatttaggtgggtgtggtggcgggtgtttgtaattttagttattgaggagattgaggtaggagaatggtatgaattcgggaggtggagtttgtagcgagtagagatcgcgttattgtattttagtttgggcgatagagtaagattttgttttaaaaaaaaaaaaaaaattagtcgggagtggtggtacgtatttgtagttttagttatttgggaggttgaggtaggggaatcgtttgaatttaggaggtagaggttgtagtgagtcgagataacgttattgtattttaggatggcgatagagtaagatttcgtttaaaaaaaaaagaaagaatgagtttatttttttttaaattatttatgaaaattcggttaggcgtggtggtttacgtttgtaattttagtattttgggaggtcgaggcgcgtggattatttgagattaggagttcgagggtaatttgattaatatggtgaaatcgtttttattaaaaatataaaaaattagtcgggcgtggtgattggtgtttgtaattttagttattttggaggttgaggtagaagaatcgtttgaatttaggaggcggaggttgtagtgagttgagatcgtgttattgtattttagtttgggtgatagtaaaattttattttaaaaaaaaaaaaaaaaaaaaatttaaagaaatttgttttttttttttagataagttttatttttttgtttaggttggagtgaaatggtacgattttggtttattgttttttgggtttaaggatttttttgttttagttttttgagtagttgggattgtaggtatttgttattacgtttggttaatttttgtatttttagtagagatggggttttattatgttgtttaggttggtttcgaatttttgattttaggtgatttattcgttttggttttttaaagtgttgggattataggtgtgagttacggtattcggtttatttgtttttttttatttacgtaaaaattttagattatataaagagaagattttttttgttttttgtttttttgtagggggagagaggttgaatattttatttattttattataatgatgtttttttattaagttttttttgtaggtatttttttttttatcgttttagtttgttttttttttttgtttttattttttttttttaaaatatttttgtgatatttaacgttttttttttgttaatttttttttaggtgtaacggggtttatttttaatttagaattattattttattttttttatttttatttttgggtagtagatttaatgttgaaaaattataaaattttattattttagtttagtataaattaatgttagtattgattttatatttattgttgtttagtaaatttttttttttttttgagacgaagttttgtttttgttgtttaggttggagtttaatggtatgattttcgtttattgtaatttttattttttaggtttaagtaatttttttgttttagttttttgagtagttgggattataaatgcgtgttattatttttggttaatttttgtatttttagtagagacggtgttttgttaagttggttaggttggtttcgaatttttgattttaggtgattcgtttgtttcggttttttaaagtgttgggattataggtatgaggtatcgtgcgcggtttattttttttgattttttggtattaaagtttgggaaaaagtgagttttatttattgtgagtaatatttttttttttttttatatggaaatatttgagtttatattattttttttttattttatttttagatgaagagaattttttttttaaagtaatattgagttgtttttttggtattttttttttttgtttttttatattatttgttatttagtagttaggagtaattttgtaaaaatgaaaattgaattagtttgtatttttggttaaatagaattaatggttttttattgtttagtttttttttattatattttaatttgttgtttatgtatataaggtttcgtgtgtattggcgtatgtttaagtttttagttttagttattttttgattatgtttagttttttttagttttagggtttttgtatattttggttttttttttgaaggtttttttttttttatttttaggttttggttttaatgaggttgaggtgggaggataatttgaatttaggagtttgagattagttcgggtaataaagtaagatttttttgttataaaaaaattaaaaaattggttgggtatgttggtggatatttgtagttttagttatttgagaagttgaggtaggaggattatttgagtttagagggttgaggttgtagtgagttatgattgtgttattgtattttagtttgggaaatagagggagattatattttaaaataataaaaaatatatttttacgatgtttattgtgtattatatatgtgtattatttgtaggtaataagttgtttataaataaaataatttaatttggttaatgaaatttttatgcgttattatggaaatgtttttttttcgtgttttatttttatgttgttttttggagggtatatttttgtttatatttaggtgaattattaattttattaatagtatatatgattggttatagggattatagaagttaaaatatatacgggaggagataaagtttgtggttaggtgtcgtggtttatttttgtaattttagtattttggggagtttaggagaaaggattgtttgaggttaggagtttgggattagtttgggtaatatagtaaggttttatttttaaaaaaaaaaaaaaaaaaaaagaatagagagagaaatgaaatttatgtttgtggcggaaagttattttggagtatttaaagtattttttttatttatgtttgaagtagtgaaattagtgattaaatatttgaaatgtaagttggtatttattttataaataatatttttatatattttatgtattattttaattagattagcgaagtaaaaatttaaaaatgtaaaagtataggttaggtgcggtggtttacgtttgtaattttagtattttgggaggtcgaagtgggtagattatttgaggttaggagtttgagattagattggttaatatggtaaaatttgatttttattaaaagtataaaatttagtcgggcgtggtggtacgtgtttgtaattttagttatttgggagggtgagatagtagaattatttgaatttaggaggtagaggttgtagtgagttaagattacgttatagtattttagtttggtaatagagtaagattttattttaaaaaaaaaaaaaaaatatatatatatatatatatataatatgaaatatatataataaaagtaatagaatttaaggtattttacgtattattatatattgaattttttaataattttgtgaagtaggtaattattatttttattttatagatgagaaaagaggtattaagaggttaatggtttgtttaaggttattgttaagattttgattttttttttttaaattttataagaggtatgttttttgatgttttttggtttttgtttgagatagagtttcgttttgttgtttaggttggagtgtagtggcgtaatttcggtttattgtaattattgtttttcgggtttaagtaatttttttgttttagttttttgagtagttgggattataggtgtgtattattacgttcggttaatttttttgtatttttagtggagatggggttttaatatgttggttagggtgttttcgaatttttgattttatgatttgttcgttttttaaagtgttgggattataggtatgagttattatgttcggtttttttatttttaatttagagtgttttttgattatgtagttatttttatattaaaattttattttttgtatgaagtttgtatttgaagtttagtattatttatttatttggttggaaaataatttttttaaattaaatgtttaaatagttaaattttagttatatagttttttttattttttttggaattggatatattttttgttatttttttttttttaatttttatatttgttttttttatttttattttttttagttagtttaggatttagttattttattttcgtaataaaagttatgggttttattttgtaggtttttatagtacgttttgtatattattatttaatattattatttattatttgtattttattttttaaatttatttttttagtttaatttttaagaaaaatggttatagtagttattatttattaatttttaagtagtttgtttttttttttaagtttgagatttgttttttttttatttttgaaaaatggttttttggtttttgattagttaaattattattttttaagatttatttttaagtgattttgttaaataattaggttttggataattttttttttttttgagtatgtggtaatttagaatttagagtacgatatattagataattgattaaattaattatttatttatgtttatttttaagttttttttaattagattattaatgaaggtagattttgttttttttttttttatatattttatagtatcgtatattttggttagatgatttaataatttttgagagaattaatattttggtttttggttatagggtagagtatttttttatttatgagattaatttggataatgagatttaaattttggttaggcgtcgtggtttacgtttataattttagtattttagtattttgggaggtcgaggtaggaagattgtttgaggttaggagtttaggattagttttaagtaatatagtaagatattgtttttattaaaaattaaaaaaaaaaaaattagttgagtgtggcggtatatgtttgtagttttagttatttaggaggttgaggtggaaggattgtttgagtttaggaggttgagggtatagtgtattttagtttgggtaatatagtaagattttgttttagaaaagagaaaaaaaaagaagttgggtatagtggtttatttttataattttagtattttaggaagttaaggtaggtgaattatttgaggttaagagttcgagattagtttgattaatatggtaaaattttgtttttattaaaaatattaaaattagttgggtttggtggtgtgtgtttgtaattttagttattcgggaggttgaggtaggaaaattgtttgaatttaggaggtggaggttgtagtgagttaagattatgttattgtattttagtttgagtgaaagggtaagattttgttaaaaaaaaaaaaaaaaaaaaaaaaaggaaagagatttatgttttaagatagaaggtatgaattattttgttttttttttgcgtgaagggttgggggaaaggaattttatgatttttaaatagtaaatattgttagtaagattgtaaataagatttatttagtggggaagaggggattattaaaagttgttagaaaattgaataaagtaaattaagattgagaatagttttaatttttattaatttttaaatagtgataggtcggtagtaattttttttttttattttttttttttgtaaagggaaatttaagtttagtagtattttttttttgttttaagtttttaattagataagaggttgtaggtattaaattttgggttggataatggtaaaggttttagaagtttatttttagttttgagttttaatagttgtttgtattagtgagttagtattaaatttattagaaaagaatagtattatttaaagattggggggtagttgggtttgaagttgtagggtaaattagaggtaggtttttgagtgatgagagttttgagataataggttatataaatttggttggatggaattttataataaggtggttattttttgtttgtttagggggatgttaaggataaggttagtttagttatatgaagagaagtagaataaataagttttttagagaaatggatgtaattagagtgggatttcggttatattaaggttatattttatttttatgtgtttgaatggttgttaggttagttgtaggttagaggtagtttttagaggaggggagattatagaggatttttaggttatataaatatgtttttcgggagatttttgggaaggaaagttttattttcggggtcggttgattatgattttatttagggtttttaatatttttcgtttgtagtttttaaagttattatcgatttggttaatattttgtttttttattatttatagttggtaattggtttttgtgatgagtcgggtattatggttgataacgattatagttttgaagaaagatagtaataatagagggtaggaagaaaggagaaagaggggaattagaatatgaaataagggagttttaggtttttttgtagtgaaggatattatagtttggtttttatggagtagggatgagggtatatttttagttgatttattatttttgtatttattgatggttttttttagagtattaatagattttatgtttaggttattggttggttcgttttatataggaggaattttatgattgagtattgtaattttcgttttttattattgttatttttatttttttttttatagtttagtttatttattaagatgaggatattaggttttcgataggttagtttagtaaatataattcgcgttttttgattatttgtagtaaaggaaggggagggttgttatatttagtattttatattttgaaggtaaatttttaagatgtgttagtttgtgagttgaggtttttttattttcggtttttttaggtatagtttgtagatatgaatgataaggtgaagggtattttttttggtttttgaagtggtattagagagtttgtagatttggatggtgtgggcgtgattttttaggtcgaagcggtttaggtatttgcgggtattttggtagggtaggttgaagtttcgttgtaggtatttagtgggcgttttttttatgcgtagttgttttgtatattgttggttgaagaagttaattttttgttcgagaagagagggaggtggtcggttaaagttatattttttttattagattattattttttaaattttaatgttaatttattagtcggtggtttttttttatttttttatgggtttgtaagggaagataaagtagttaagaggagggtaagggaaaaaggtgttgtagttttatatattaattttttttttttttttttgagacggagtttcgttttgttttttaggttggagtgtagtggcgcgatttcggtttattgtaatttttatttttcgggtttacgttatttttttgttttagtttttttagtagttgggaatataggtgtttgttattatattcggttaattttttgtatttttagtagagacgggattttattatgttagttaggatggtttcgattttttgatttcgtttatatattaatttttttgaaggagagataaatattagaaatgggttagggataagtatgtataagaaaaggaataggggttgggtacggtggtttatgtttgtaattttagtattttgggaggttaaggaaggtaggttaggaggtatttaaggttaggagtttgagattaggttggttaatattgtgaaattttgtttttattaaaaatataataattagttgggtatagtgggatatgtttataattttagttatttaggaggttgaggtataagaatggttttaatttaggaggtggaagttgttgagatcgtattattgtattttattttcggggataggggaagattttgttttaaaaaagaaaaggaatagggatgtttttttaatatgataaaggtatggtgagtaaagtaaaagagttaagggataaaaggggagttaagtaaaatggaggataagagggataagtaggagggattaattatagttaaagaatatttgttttttatatagcgagatttacgaatggtatatcgtaagggttttatgtggtaagtttagtgttttggggagaatttaataatatttttttaaagatttaatttttggatatgagaaaatggttttttaatattgttagagagagtagaaatggttataaattttttaatatattagatggtaatatattataaaagtttaaataaaatggtagagtttgtcgggcgtggtggtttatatttgtaattttagtattttgggaggtcgacgtaggtagattatgaggttaggagattaagattattttggttaatacggtgaaattatttttattaaaaatataaaaaattagttgggcgtggtagtacgcgtttgttgttttagttattcgggaggttaaggtaggagaatcgcgtgaatttaggagacggaggttgtagtgagttaagattgtgttattgtattttagtttgggtgatagagtgagattttgttttaaaaaaaaaaggtagatttatatgaaataagtaattgtatggaaaaatgtttgatatatttggaaaaatttagttatataataatttatatgatagtttatttttgttaaaaattatatgtatatttgtaaagaaaaaaggagaaagatatttattaaaatattaatattggttattttagttgggagcggtgtttacgtttgtaattttagtattttgggaggttgaggcgggcggattataaggttaggagttcgagattagtttgattaatatggtgaaattttgtttttattaaaaatataaaaagtagttgggtatggtggggcgtatttataattttagttatttaggaggttgaggtaggagaatattttgaatttgggaggtggaggttgtagtgggttaagatcgtattattgtattttaggttgggcgatagtgagatttcgttttaaaataaaataataaaaaaaaaaaattggttatttttagattttttttttaagtattttttttttttttttgatagagttttattttgttatttagattggagtgtagtggtacgatttcggttaattggaatttttgttttttggatttaagtaatttttttattttagtttttcgagtagttgggattatagtcgtgtattaatatatttagttaatttttgtatttttagtagagatgggattttattatgttgtttaggttggtttgttttttttttttagacggagttttgtttttgttgtttaggttggagtgtaatagcgtaattttagtttattgtaatttttgttttttgagtttaagtgatttttttgttttagttttttaaaatagttgggattataggtatgtgtaattacgtttggttaattttgtatttttagtagagatggggtttttttatgttggttttaaatttttgattttaggtgattttttatttcggttttttaaagtgttgggattataggtgtgagttattatattgggtttaggttggtttttaatttttaagtttaagtgatttgtttgttttagttttttttaaagagttgggattataggcgtgagttattacgttaggttaattttttttttttttttgagatggagtttcgttttgttgtttaggttggagtgtaatggtgtaattttagtttattgtaattttcgttttttaggttttagtaattttgttttagttttttgagtagttaggatataggtgcgcgttatcgtatacggttaatttttgtatttttagtagaggcggggtttattatgttggttaggttggtttggaatttttgattttaggtgatttttgttgggattataggagtgagttattgtgtttggttcgtttatgtaatttttaatcgttttataaaagatatatattttttgtataattaaaatacgtgggtgtgttttttagttttattttaatttttttagtttttttttttgaattgatttaagttttttttttttttattgttttttttagggaaatgaattatttattatgagttttgtatttaattttatattttcgagaggttttttgattttagtttttggtaaaagtagttgtgtttttatattttttatgttttttttttttggttttaggatttatcggtgttagtttgttagttagtagtaggagtagcgtatttttttttatattattagggtttataatgtaaattgtaagatggaagataggtggttaaagaggtttttagagattttttttgtggtttttgttatatatttttgaggtaatttcgttaatttattttttgaatttatgtcgatgttaaaatttaagtttttaaagagtggtttttgtttttggtagtcgaatgttatatttgaaagttacgaaaagaagtaatttatattttttttagtttttgtaaagttttttttatgtgttggttttggagaataggagtaattttagttttggtggagaatttagggtgtatatatatgttttcggtgttttttgtggagtagtagaggttcgcggtatttattatgtagatttagtattggagggttgagtggtggggggtttggaaaagtgaagcgtatagtgtattttttagggcgttttaggagtttaggggttttttgggattttttattttggttttttcgtcggtatttttgttgttttcgagttagggtttttttcgtttgttttttttggagaggaagaggaaaaaagagaaatttgagttttgtacggtagtttttgaaatgtaggttagcgttttagagtttttttttttttttattgttaggagagaatagtggtttttagtttagaagttttttaggtgtttatcgtttgtttggtggatttttcgtttgtttttagtttttttagtttttttttttgttttttatattgttttagtagttttttttgtttttgttggtatatttttttgaaggttattggggtagaagaggggattaggtattagtggttgtttttttttttagtaaagggataattagggattggtggtgatggggtaggtattattgtttggaattttgataggatttagtttatttaaataggtttttttatttaggttttttttcgaggttttattttttttttgtatttatatataattttatttattgtaattgtttttatagtagtggagtcgttgggtatcgaggtggatgatattagtgtagatattatttaagaagttttggttatgggagacgattagtaaggtttttcgttagttttggaggtagttgggttttagagaatagggtgtaagtgttatagtggttaagtgagagagaatttagaggaagtaggtagataacgggggttgggagggaaaggggggtttgaatagagttttatttataggtatagtggagaagggttaaaggaaaatagggtagggagggaaggggaagaaagtgtagaatgggaattaatgatgtaaaggtcgtaacgtatttattaagttagatgatagcgttgaggtttaggtggttggtgggtttatttagtattagtagtgtgggttttatgaatagtgttttagagggtgggtagtagagggtagggttagggagagaaagatttttgtttagataattttagagaaaattcggagatagagtttgagattatgaatatttttttttaagttttttttagagaagttttcgggtaggatacggtttaatttttttgagatagggtttcgttttgttgtttaggttgtcgtgtagtggtataataagggtttattgtagtttaaattttttaggtttaagtgatatttttattttagtttttagagtagttgtgattatagcgtgcgttattatatttagttgatttttaaattttttgtagagatagggtttttttatgttgtttaggttaggatatgttttttttttttttttgtgaagatagagttttattatattgtttaggttggttttaaatttttgggtttaagataatttttttgtttttgttttttaaagtgttgggattataggcgtgatttattgtatttagttgtagggtatgttgatgagaatttattattaagtagggagagaaatagagaaagattttaagtttttataatatagatagtaaggagggagaggtaagttttgagtttttttattggttttggaagaatgagaagggaaagaggaaaagggtttcggtggtttgaggttggaagggagggtagtgaggtgaatggtttatttggttagggagatacgtatgcgttagttttttgagaatttttgtgtgggtcgattttgtattttagggttaaagtttaggttagttaggattcgtcgtgttttggtttttgtagttgtcgttttagtggttcgtaattttttatatatttgggaggagggagaagaggatatacgtttgagggttttaggaatttttaagtttttgttcgtgttttttgcgttattttttttattttttttagttttttagtagttgtgttatttttttgttttagttgtttttgaagtcgtcgttttttttttagtagttttaatcgtttggtgttagttcgaagaatagtttggattgttggtgttttatttgttattatttttgggaggtagagggagaatagttaggtagttttaagagttaagagttttatttttttttttttttaattatatttttgttttgtttgattttgtttagttttttgtatttgttttaaataaaatatttttaagttttttattgattttttttttttttttttagtatttttttttcggtttttagtttttttttatattttttttaattttatagttataattttttttatttttggttggttggtttttttatttaattgtttattttattaagttttttttttttttagtggttttattttgtttatatagtaatatattaatgttgggagggatgtttagggttcggttggtaatgtgtttgaggagtgtggttttgtttttgttggggaataaaagttattaggatttggttattattgagaaatttttttttttttttttaggtttttttttgtttttagtttttttttttttttatttattgggttttattagttcgtagcggcggtcggttataatgtataggtttgtattgacgaatagttttttgttatgagcggagatgttgaatttttttagttgtagttattaggaaagaggtggtagagggaagggatgattatatgaaaattttttttttgggataggagcggttattttttttttgtagggaagtttttgataaatcgttatttttagtataattttttttttttttttatagtcggttttcgttttgttcgttgtttgtaatgggagttttatgtatttttagttagtttagtttgttttatattattttttgttaagggtggattttatttttattggtttttttatttttttgtttaagttggtagaatttaaggtgtggaaaatgtttttaatttttttttttattgaattaatttatttatatattatagttatttagggaagatgagagaattggtttttttttaggtaagtggattggaaggggttttttgagattttattttgatgttagatgtattttttaatatggtttggcgggaggatattttcgtttgggatacggagaagttatttttagttgtattggttgtttttaatgaagttatttggcgtttatattttatttgagaaggtaggaaaaattatatttgaagttatagtttattagttttttattattatgaaatagtttatgttggttgggtatgttggtttacgtttgtaattttagtattttgggaggttgaggtaggtggattttttgagtttaggagtttgagattagtttggttaatatgttaaaatattgtttttataaaaaatataaaaattagttaggtatggtggtgttatttatagttttagttattcgggaggttgaggtgggaggattatttgagtttggtaggttgaggttgtagtgaatagagattacgttattgtattttagtttgagtaatagtgtgagattttgttttaaaaaataaataaaaaattttaaagtgaaatagtttatgttattagatattgagataaggtttatagaatataattatttttttatttcgattgttttatttggagtagtttttaaatttttttttcgtgtttttaatcgtatgttttttagttgaagtatttaaaaattttttatttttgatcgttaagaattaaggttttatttgtttttttagttttttttttttttttttgttaagatgagtatagggattatttgttttagattttttttttttttttttttttttttttttttttttttttttttttgaattttgtgagaattcggggatggttaaaattagggatttttggttgggcgcggtggtttatatttgtaattttagtattttgggaagttaaagcgggtagattttaaggttaggagattaagattattttggttaatatggtgaaattttatttttattaaaaatataaaaaattagtcggacgtggtggcgggcgtttgtagttttagttattcgggaggttgaggtaggagaatggtgtgaatttgggaggaggagtttgtagtgagtcgagatcgtgttattgtattttagtttgggtgataaagtaagatttcgttttaaaaaaaaaaataataaaaaaaaattagggattttttttagaatttagattttatattatttgttttttgtttttgttttagtttttttttttattatttagagttttaaaatattttgggatttttttttatttttatatttagtttttggtttttttgaggttttttattaatttttgttattaggaatggtataagataaatggtatgaatgtgtatttatgaaatgtgataacgcgttatgtttttataaatgtaatttttaatataatgtaattgaaggtggagtaaatggattttaagagttttatttgtataaaatgagtttttgtggtttttttgttaatatgtaaagaaaagattaggtagtcgttcgggtacggtggtttatgtttgtaattttagtattttgggaggttaagatggatagattataaggttaggagattaagattattttggttaatatggtgaaattttgtttttattaaaaatataaaaaattagtcggttatggtggtacgtgtttgtagttttagttattcgggagattgaggtagaagaattgtttgaattcgggaggtagaggttgtagtgagttgagattgcgttatcgtattttagtttgggtaacggagtgagattttattttaaaaaaaaaaaaaaaaaaaaaaagattaggaagttttagtgtatagttagaggaatttagtagaattatagaattaggaagtgttagacgtatagggattttagagattttcggatttttttttttattatataaaggagataagtgagatttaaggggatgggaagatgtatttaaggttatatagttagtgaaggtagagttaggatttagattatttgagataaattttaggttttttttttattggattaggtgttgtaaattatagtttatgggttaaggttgatttgatatttatttttatatagtttttgaattttataaaaataatttttgtatttttaaagagttgttaaaaaaaaaaaagaatatgtgatagagattgtatgtggtttgtaaagttaaaaatatttattatatggttttttatagaaaaagtttgttggttggtatgttggtttatatttgtaaatttagtattttgggaggttgagggaggaggattgtttgagtttagaagtttaagattagtttgagtaatatagtgagattttatttttatattaaaaataaaaaaattagttaggggtagtggtgtatatttgtagttttagttatttagtaggttgaggtaggagaatttgttgagtttaggaggttgaggttttagtgagtcgtgtttatattattgtattttagtttgagtgatagagtaagattttgtgtaaataaaaataaaaataaaaataaacgaattattattttaattatttttttaaaaaaagaaaagaataaaggtttgttgggataataattatatttttagattttaatttttttataaggattttggaagttttagttttttattttattttgttttaatattaaatatatatttgttttgtttttttggtttttttttttttttgtttgggaggtttttttttttttataatttttttttttttatttttttttttattgtttagagtagcgaatttattttgaggttaatagggaaaagataggtttgatgaaatgtttttttttttttttttttttttttttgagacggagtttcgttttgttatttaggttggagtgtagtggcgtaatttcggtttattgtaagttttatttttcgggtttacgttatttttttgttttagtttttcgagtagttgggattataggcgttcgttattacgttcggttaattttttttgtatttttagtagagacggggttttatcgtgttattaggatggtttcgattttttgatttcgtgattcgtttatttcggttttttaaagtgttgggattataggcgtgagttatcgcgtttagttttgatgaaatgttttaatttttgggttttaatatttttttttgttagttatttttttattttagtttttttttttgatttttttttttttttttttttgtttttgagtgtaggttgttgttttttagatacggtttggaggagatatatatatatattatatatatatatataaattattgtgttattttgttgtgtaataagtatttttagagagtttattgtgttaattatatatatgtttttttatttacgataggttgtatttcgataaatttattagaaatttaaataaaaaatgatagtttttggtcgggcgtggtggtttatatttgtaattttagtattttgggaggttaaggtaggtggattataagattaagagatcgagattattttggttaatatggtgaaattttgtttttattaaaaatataaaaattagttgggcgtggtggtacgtgtttgtaattttagttatttaggaagttgaggtaggagaattatttgaattcgggaggcggaggttgtagtgagttaggattacgttattgtattttagtttggtaatagagtgagatttcgttttaaaaaaaaaaaaaaaaaaaaatagttttaatttatgatgggtttatttggatataattttattatgagttgaggagtattttaaatgagtatgatttttatattattataaagtagaaaaatcgtatatcgaagtagaagttggagattatttgtattgagtgttgttgacgaaaaatgagatttagaaaaattttattttttagttttagattagatagcgaagagataattagggaacgttagtaaggttaaggattataagttaggtaagtgcgttattagagtgagtggtattagtattggaggtttttttaagagtttaaatggatatggattaagatgtatacgtagaagagttataagtagaagagtaaggatttggggttttgttttaggttttgtgtttaaagtaatagaattattgtagatttttgagtgataaaaatggtatggttttttttgttgttttttttttgagattgagttttgttttgttgtttaggttggagtgtagtgttttaattttagtttattgtaaattttattttttaagtttaagtgatttttttgttttagttttttaagtagttgggattataggcgtacgttattacgtttggttaatttttgtatttttagtagagatgaggtttcgttatgttggttaggttggtttcgattttttgatttcgtgattcgtttatttcggttttttaaagtgttgggattataggcgtgatttattgtgtttagtttgggtatgtattttaaaaagatgattttaatagtataagtaagatagatcgagaagagttagtttaaaagcgggaaattattttattatggttagaaggtgttaaatggagtgagagtgattgatcgagttattattgttattttattgattcgattttttttcggtttggtaggtttaggaggatgttttttttttttttttttttttttattttgattttgaattagggttgtaaaaatattattattttagagaatgaaagggttatagaagttagtaggatggttaaggttgtatttttggagttttcgtttattatatagatggtttattttggttttttttttttcgcggggttttggggcgggtattgaaatgatagggggagaatatgagataggaaagaattataatgtttggttttttaattgaatttaatttgaagattagggtatgaggtattattttttatgatttatggattttaggtatttatttttttttaggttatttatttttattttttttattattggttggtattgagagttttttaagacgttttatgagtttttttttttttttattattatttatatttttttttcgtttgttttttcgggtatttcgtttttttttttgttgttgagagtaaaagaatagtgagaaaatgaagtttaggtttttgttgtatttttgttttatagagggttttttattagttgaatggagtaatatgggttggaaaggggttggtggaatttagatgttttttaggattggtgggttttgtggtatttgtatttgttgttgttgttgttgttgttgttgttttttttttttgagtattttttttttttttttagtttgtttattttttattgttagttttttaaagaattataaagggagttaagttataggtaaatatgtttttaagagtaatttaagtaggttgtgttttgttatatattggtttattggttttttattttatttttattttattttttgttttttttttttttttttttttgtggagaatggagtgtgtaggttttaaatttttgggtttaagttatttttttatttttgtttttttaagcgttgggattataggtgtaagttatcgtgttttgtttatttttttttttgataagattttttttttttttttggattttttattttttttatatggttatttatttagtttggaaatatttatagttattttttatttttaatttttatttttttatcgtttttttgatttttttgttttttttttttttttttattattttgtttagaaagttaagcggatatcgtgaatgtttatttgtaaattttaaagtagtttgattttttttgtaaagatttttgtagtttttattttattttattatttttttagtttaattattattttttaaatatttgtattgttttataatttttgtagaaataattatttttatttttatttatttatttattaagtatttattaaatagttattatgtgttagatattgtgttagcgtaggggattatagtaatgaataagataaatgtggttttttttggagtttgtaggttataggaagagagatttttaaataggtaattttaggtgtattgaaggttttaaaagaaaaggtaaagtttatttggtggtgggggagaggttggttttatttttggtggcggtttttttaagaagatggtatttaagtaaataattgaagtaatgaggagtatgagaagttagttagatatatggtgtaattttagtgttgtgtataggtttagttgtgagaaagtatatatattgagagatagggaaaggtttggtatggttaagtttatagattgaggggagaatggtgtaaggtaaggttggagtgagggttttgtagtaaggttaaggaatggggattttattggtatgattatttttatattttaaagttttattttggttttagagtatagtaagaatcggagggaataagtatagtgggaaatttattggggaggttgttagagtagtttgggtggtggtgataagcggatataaagaagaatttataggatggggttagaggtggggaataaagagtattcggtcgggcgcggtggtttatgtttgtaatttcggtattttgtgaggtagaggtaggcggattatttgaggttaggagtttaagattagtttggtgaatatggtgaaatttagtttttattaaaaatataaaaaattagttaggtatagtggcgggcgtttgtaattttagttatttaggaggttaagataggagaattgtttgaatttaggaggcggaggttgtagtgagttgagattacgttattgtattgtagtttgggtgatagagtaagattttattttaaaaaaaaaaaaaaaaaaaaaaaaaaaagagtatttagagatgatttttgtgtttttagttggtaaaattagttgggttaagtggtattatttattaattaaggaggtagtggaagagaaggttttataggaaggaagaagatattataaatttaatttgggagatatgtgtagatatatatatatgtatataatatatatatatttttttttttttttttttttttttaagagatagggttttgttttgttatttaggttggaatgtagtggtatgattataatttattgtaattttaaatttttaggtttaggtgatttttttattttagttttttgagtagttaggattataggtaagcgttattatgtttgtttaattaaaaaaataataatttttagagaggaggttttattatgttgtttaggttaattttgaatttttggttttaagtaatttttttgttttagttttttaaattgttggaattataggtttgagttattgtgtttggttagggggatacgttgtttgtaaaatttataggttatgtaaatagagttatttggtaagtaaatgaatattttagtttatgttttatttgttttgtttgaatattatagtataaattatattgtgttatatttatttgtttgtgtgtttttattttagagagtaatttgagagattgtttagtttgtgtttttagtaaagttaaaatagatttaatagattttagttttttttttttttatttttgtttttttgaaggtagaggattatgtttaatttttttttttattggaggtagttttatgatttttttttaggtttaggtttatttattatttttttttttaaaatattttttttatttattgttatttaattttatttttaagtattttagtatttaatattaaaaaaaaaaaattggtcgggtgcggcggtttaggtttgtaattttagtatattgggaggttaaggtgggtggattataaggttaggagattgagattagtttggttaatatggtgaaattttatttttattaaaaatataaaaattagttgggcgtggtagagtacgtatgtagttttagttatttgggaagttgaggtaggagaatcgtttgtatttgggaggtggaggttgtagtgagttaagatcgcgttattgtattttagtttgggtgatatagcgagattgttttaaaaaaaaaaaaaaaaaagaaaaaaagttaatggtattcgttatttattatattaaaatatttttagattagaattttatgtattttaaagtaattatttatttaggaaagttttatgtgtatttatttttttaaaaaattagagttaacgagagataattttaataattaaaggttttatagattaaaatggttttattttattttttttgtttttttatttatatttttggtttcgatattggtttttttttgtttttttatgaagttttaggtacgtttatgtttgtttttgtttaatttgtattttttatttagaatatattttaaagtttggggttttttttttttttaaaaaataaattataaaaaataaataaaaaagttaaagaaaaaaaatttgagtttagtattgggtgattagtgtgagagttgaaaaattgtgtaggattaataataaaaggttttatatgttattttaaggagtttaattttaaaggtattaggaggaaggatttattgaagtatttaagaaggaaaaatttgattagtttattttattaatatagatgattgatttattttagatattaatttttttttaaggattaatatagttatattattttttttttttttaaattttttttgtggttaggtatattggtttacgtttgtaattttaatattttggggattaaggtgggaggattggttgaggttagaggtttaagattagtttgggtaatatagtaagattttatttttatagaaaataaaaaataaaaataaataaaaaataagttaggtatggcggtgtgtgtttgtagttttagttataagggaagatggtttgagtttgcgattgaggttgtagtgagttgagatcgcgttattgtattttagtttggagtgaggtttcgttataaaaaaaaaaaatttattaaaattaaaaaaattttttgtattttaattatttttatttattttattatagggataggaaaagtttttgaagagttttattgtgagaaagtataatttttaaggaattgaaaaagattaagtgtggttagagatatattgtgtttttttttttttcgtgtatcgtttaagttgtttttttaaggtaagaaagtaagttttttttatttttatattttttttttttattattgtttcgtatttttgtttttattgggttttaaaatcgtaatttataagttttattttttttttttttatatttttgaaatatattgtaatttggtattattttcgaatgaatattatttttgttaaagttgttattgaatttttagttttttaaattataaagtattttttggtttttattttgtttgatttttttgtagtattttatgttgtttatttttatattttttttatttttttttattattatttaatttttgggattttgtttatttttggtttgtttttagtttttttggttgtttgttttttttagttttatttttttagtttttttttttatttgttttttgtaattgttgaagttttttagggtttttatttttaattttttttttggtttaatttgtaaatattttttaggggatttttttatatttagtattttaattatatttgtttgtgtttttatttttagtatagttgtttttttatagtgattaaataaattttttttttgttatttttttttagaaatttttagaaacgtttaatttagtatttagaagtttattttatttttttttattttttatttttttgtttattattgtttttagttaatagtttattagttattgggttatttaagtgttaattttatttttttttttatttaattagtttttagtttcgattaatgtcgtttttttagtaattttttattttttaggttttggtttatttttttattattttttatttagattatggttagagttttttaaatggttttttcgtttttattttgattagtttaaggttatttattttttattgtttagtgttataggtgaattgtttataattattttttatgtattttaatgggtttttttttttaatgtttttaggattaaatttttcggaatggtatttaaagttttttattatttgttttttgagtatttttttgattttattatattagttattaggttttagtgggattagttaggtttgtttatatttttattttttataaatttttttggtttggaatgcgtttttttttgttaatttacgatgattttttaagaataaattttggggagtagatgtagtggtttacgtttgtaattttagtatttttggaggttgaggtaggagaattatttgagtttaggagtttgagattagtttaggtaatatagttagattttgtgtttataaaaaattttaaaaataaggtgtggtggtgtatgttagtagttttaattatttgggagattgaggtaggaagattttttaaatttaggaggtggaggttgtagtgagttatgtttatgttattgtattttagtttgggtgatggagttataatgtgttttaaaaaaaaatatttagttattatatatttttgggaggttttgttgatatttttttatttgtttgagtagatgtttttttttttttttatagttttataatatttttaagtatttttattatattttgataattattgtttgtttggttaatgttttgattttttattatattgggttgttttttgagggaaagttttattttttatttttatatttttattttttttatatagtatttggtatatagtaggtatttaataagtgtttttaaaattagttattgtgtatttattggggttagttgtgtttatttatgttttttttaaaattgattttaattttgggaggatatttttatgtttttttttttttttttttaaagtatagtatatagagtgtttaattaaaaataagcgtttaataaattttcgttgttttttaagtaaattttaatttttattttaatattaaaaatttatatttttgttttagttgagtgagaggggtgttttaagaaagaaattatgaaggagttatttttttttgagaaataagggggattataggtttttaaggtgtgtgtatgcgcgcgtagggggaaggggaggtcgaggtagggtttatatatttttggtggaatatagtgtatggtggggcggatgtttaaattttttaagtaaggtttttttatttttttttatttttttttcggtgttatatgtttttttttttatttcgtttagttttatttaggttacgtgcgatatttggattttttttttttaatttcgattttaaatttattttttttcggtaaatttttttcgggtttacggtacgtatgcgtagtaattttcgtacgggttcggttagtttcgtgttttatgatttttttttaaaatacgcgtagtttttttttttttttttttttgttcgttttttttttgtttattagttttatttgatgggttcgtgtttttttcgttttcgatttattcgggtttcggcggttgttgtttgggcgttttcggtatcgcggtggtagttatagttattgtggcggcgttcggtgttattttcgttttcggcggcggggaatttcgatggggttggttttttaagttggcgcggttaatttcgttttcgggttgcgtacgtgcgagtttcgtcgttatttcgggggcgtggttttggtttagtggaggcgtggtttgtaatgacggagcggggtcggcgttcgtttgttttagtcgcgtaaatatatggcgtttacgattgtttgggaagtttgacgtcgtgatttttcgacgtcgcgagatttaaggaatgaatataataattttttattagtatgaaggagttgaggtatattgtttttttgtttgttttgttttttgtttttttaaaaagtatattttagtttttatttgtaattcgtttttagttttgttatcgcgatgtcgaaggcgtttaagtagtagttgtcggagttcgagtggatcggggacggagagaatacgagtttattaggtgaggttggtaggtaaggaagatacgagaggaaggggaagagagaggagattgcgcgtgttttaggagagggttatggggcgcgagattgattgggttatgggtagaaaagatagtgtagattaatggttaagggagaggtttgatcggtttagtgttgaaatgtgttataaaatttcgaagtgtataattgtaaatagggaattggagtttaatatgtagaagttacggtgtagtggagtttcggtttatttattttttttggtaatagttttattgagatataattgatatataataaattgtatataaaataaaatggtatttaaaataaattgtaaagtattatttaaataagttttgatttgtataaatttagtaaattattattataattaagattttggtttatttttaattttattatttaatatgggagtttgagtaaggtgtttttgtagttttgttagtttttaaattattataattatgtttttgttgttattattgtttgaatttatatttgttaaagttaatagatttggggttattttatttatttttttattaatgtttgatagatttggtcgtttttttttttttttgttttttttagggatattattttttataggttttttttgtatttaatgggttttttttgaagtttaaatgttgaagtgttttagggttaaatttttgatattttttttaatttagatttattatttattattttttgattttaaatattatttataattaatgaagatttttaaattttttttgttggtttttaatttttgtttcgagttttaggtttatgaatttaattgtttatgggatattttttttgagatttttaataaattttttttatacgtataaaatggagtttttgtttttatttttaaagtttgttttttttaggtttttttattaagaaattgtattataggttatttagttatttgggttaaaattgaaaggttattattttttttttttatttttttttttttaattaatttattagttagttaagtttgttttatttttttatttatttgtttaataaatatatttattgagtgtatagtatgtgttaggtatttttttacgtttttgggatattattgaataaaataaagatttttgattaggtttttagtaggggagatgattttatagataaaagaaaatatggattaagtttaaaagtattaagaggatagattttagttttaaatgaggttttagtaaagtgaaatttaagtaaattattaaagaagattagttttggttatatggatttttaggagaagggtttttttagtataagaaatagttggagtaaagttttgtgataggagtgttcggatatatatggggaataaataggaaggaggtaagaggggttggagtggtacgagtgagttagagttgtgggaaaggtgaaaagagaagtaaagtagggtttggattgggaaaggttttttaaattattttaaggattttggttttttttgttgatttaaatggaagttattgtagagttttgagtagagtgatgtgatttaatttatattttaaaaggatgatttgggttggggcgcggtggtttatgtttgtaatgttagtattttggaagttttagatgggtggattacgaggttaggagattgagattattttggttaatatggtgaaattttatttttattaaaaatataaaaaagttagttgggcgaggtggcgggcgtttgtagttttagttattggggaggttgaggtaggagaatggtatgaatttaggaggtagagtttgtagtgagtcgagatttcgttattgtattttaggttgggcgatagagcgagatttcgttttaaaaaaaaaaaaataaaataaaataaataaaaggatgatttggttaggtgtagtggtttatatttgtaatgttagtattttgggaggttgaggtaggagaattgtttgagtttaggggtttgtgattaatttaggtaatatagcgagattttttgttttcgtatataatataattttttaatttttattttattttatttttttgagatagagttttgttttgttgtttaggttggagtgtagtagcgtgatttcggttttttgtaatttttgttttttgggtttaagtaatttttttgttttagttttttgagtagttgggattataagcgtgcgttattatgtttggtttatttttgtatttttagtagagacggggttttattatgttggttaggttggtttcggatttttgatttcgtgattcgtttgtttcggttttttaaagtgttgggattagaggcgtgagttattatgtttggtttataatattttttaaattgttaaataaaaaggatgattttggaggttgtgttgagaataatttgggcgggaggtgggagggggtaggtagtaaagaatgggtagaaatgatagaagtagggagatttattaggaggtgatggtgatttagattagggtgatagtagtggaggtgtgaaaagggttggtttttgaatgtattttggaaaagagttaataagttttgttaatggattggaggttatgtttgataaatagaattaaggatgattttaatatttttggtttgagttaattagaaagatgtaattgttattaattgagacgaaaatataatttaaatttaattatttttttttatttttattttgattaagttatcgttttttttttttggattattgtattgcgttggttttttaattggtttgtttgttgttatttttattttttagtttattttttatatttatagttagaggtggttttaaaatgtaaatttatgggttaatcgcggtggtttacgtttgtaattttagtattttgggaggttgaggcgggcggattaaaaggttaggagtttaagattaggttggttaatatggcgaaattttgtgtttattaaaaatataaaaattagttaggcgtggtggtgggcgtttgtagttttagttatttgggaggttgaggtaggagaattatttgaattcgggaggtggaggttgtagtgagttgagattatgttattgtattttaatttgggtgatggagtaagatttcgttttaaaaagaaaaaaaaaaaaagtaaatttatttgtttaaagtataaaaatatttaaaaaagtataaaatttagaataaaatttaaatgttttattatagtttatagggttttgtataatatgttttttgttaaatattttgattttattttttatagtttagttatattgggtttttttttttttttttgaattaggattttggtttgttatttaagttggagtgtagtggtataattatagtttattgtaattttaaaggatttttttattttagtttttaattagttaggattataggtatacgttattaggtttgggtattttttaaatatttttgtagatatagggttttattatgttgtttaggttggttttaaatttttgagtttaagtagtgtttttgttttagtttttgagagtgttgggattgtaggtatgaattattacgtttggtttggttttttatttttattttaaatattttagagttatttttgtattaaggtttttgtttttgttgttttttgtgtttggaacgtattttttttgtgtgtttatatggtttgttttttcgtttaattttttttttatgtgttatttttttaaagtagttttttttttgtattaatttgtttttttttatttgttattttttaatttttttttttattttatttttatttgaagtatttattattatttaaaattatattatttatgtatattgtttattatttttaaagtaatgtaagttttatatgggtagggattttgttttttttattgatgtagttttagtttttaaaatagtgtttgttttatagtaggtattaaagtgtttattgaaagtatgtaaagtttggttaggtgcggtggtttatgtttataattttagtattttgggaggtcgaggtaggtagattatttgaggttaggagttcgagatcggtttggttaatatggtgaaattttatttttattaaaatataaaaaattagtcgggtgtggtggtgggtatttgtaattttagttattcgggaggttgaggtaggagaatcgtttgaattattttttttttttttttaaaaaagtatgtgaagtttaaataagataaagataatgtttataaagagtttagtagggtatttggtattgagtaagtagttaggtgacgttatattttgagatttttttttgttttttcgttatttttttttagtttttttgtttggtttatttttgtttttttttatttagtaatttaatgttagagttttttaaggttaagttttgggttttttatttatagattttttagagaggtttattttagttattatgttttttttttttttggatatggagtttcgttttgttgtttagggtggagtataatggtgtaatttcggttaattgtaatttttgttttttgggtttaagttatttttttgttttagttttttaagtagttgggattatttataaatgtttattattacgtttcgttagttgttgttattttagtagagatagggttttattatgttggttaggttggtttcgaatttttgattttaggcgatttattcgttttagttttttagagtattgggattataggcgtgatttatcgcgttcggttattatgttttgagtagttttttaattattgtttttatttagtattttatttattttttttatatgatttattttaatttgtaattatatgtttgtatatttttaagaaaaatagtttttgagaattgggaattggtttgataataattggtaggttttggtgttgttgggagttggtttgttgtttatagttaggttatggtatttttgttgaatataaattattttatagaaaattagtgttaaataaggttattttgtgtttgtgatgaaattagataaattttaaaattttgtttaagtataaaaatattatatagttttttgttagttaaaatgtgttggtttttttattttatagttttagttatattttatttttttttttttttagataagattaagaagtagttatttttttgatagtatttaagttagaataattttttgttttttttgaaattattaaatataaattttaattttgttatttttagtttttttttagggagataatttttgtagaattaataaatttaatttaaatgtttgtttataagttgaggagttataagttaatttttaagaagtttttttcggttgggcgtggtggtttatatttgtaattttagtattttgggaggtcgaggtaagtagattattaggttaggagatcgagattattttggttaatacggtgaaattttatttttattaaaaatataaaaaattagttgggtatggtggtgggcgtttgtagttttagttattcgggaggttgaggtaggagaatggcgtgaatttgggaggcggagtttgtagtgagttaagattatgttattgtattttagtttgggcgatagagttgagatttcgttttaaaaaaaaaaaaaaaaaaaaaaagaagtttttttttagataattggtgtttttagttttttttttattttgaggttttgaatatggatgaggaagttagagttttattttggatagtgaatagaagtttgtggttgtgaatttgaaagttgggggttgaggttttgaatatttagggattttgtagtggtggtattgttatatattttggattgttgattgtttattttttgatttgtgagagaaataaatttttatttttttaaaaattatttatttttatttttattttttatttatttatttttgagatggagttttgcgttgtcgtttatgttggagtgtagtggtgcgatttcggtttattgtaagtttcgttttttgggtttacgttatttttttgcgttagtttttcgagtagttgggattatagacgtcggttattacgtttggttaattttttttttatttttagtagagatggggttttattatgttagttaggatggttttgattttttgatttcgtgatttatttattttggttttttaaagtgttgggattataggcgtgagttatcgcgtttagttataaatttttattttaagatttttttttaaatggtagttatataagttagaattatttggagaaatttgatatttttattttgatttgtaatttttaaatgtttatttttttttaattttattatttaagtttatgttattattatggtttatttgtattattgaagtagttagtagttttttaattaatttttaggtttaaggtgggttttttttatataagttgattttttttgaaaagttagtttaagttatgatatttttgtttaaaattttttaaaggtttttgttttaagaaaagagttaaatttttatgttttttaaggttttgagtggtttaattttttttttttttgtattattttttattgtttttaggttttttagtttttttttttttaggttttttagcgaagatttttgttttgattttttttttttattttattttttgtttattttttggagtttgttttagttgtattttttattttgattttttttattatataatttttttttattttttttttttttttgttttttttttagtatttttgataggtttaattttatatgttatttgtgattatgagaaatttgttttttttgtatattttaaatttattggttttggttgttagttatttttagtgtttggtatattgtttggtttataggtattttgtaaattgttgttgaaagatttttttattattattattttataaatataaattttgtaaagtaaaatatttaaaaataattttacggatatttggtttttttttttttttataaaattttgtttttgaatataaggtagtttgttttggttgatgtttataggttaatggaatttttattggttttttttagtttggaagaattttaagttttgttattttttattattagtgtgtatgaattaaagaataagttgattttattaggtgagaatagttttatttgtaattttagagatgattagaatatagggattaaataaaatgttggtttttattgtatttattattaatataaaaaaagttaaaaagaaaaaaaaaaaaaaaattttatttttagttttttaatagtttttattttttttttttgttaatataatttttgatttatttttttagggttagtttaaaattgaatttgtttattgttgtttttatagaaaataattagtgttagggatgtaggggaagaggattggaagagggtaatagtattgtttagtttttatttaaagataggtaaggtggagatttatagaatttaaatgaatggattggtggttttataatgatatagtttaattaaaatgggttggaagggatttaggtaggataaagttattggaggttttataagatatgttatgggtttgtgttagatttagaataattaataggagaagaatggggagggttagggaggtagtttgatggaaagtttataatttttttatgttgggaagtgggaaagtttagagggtattaagcgttttatttattttggtaggaaaatttattttagtgttgggaagttataaaaatgttacggatattgagaaaggttataaggggatgtatagttttataaagtacggtgattatagatagattatagcggtggggattatgttattgatagagaaattatgaaatttaaaggtagggagagtggttttttaggaagtaattttgtattagttatttaaatttgattttaggttagataatttggttgagttttataagtagttgataatattgggggtagggaatgttatataaaaaggatttaaaataagtagttaaaagaagggaatggtaggaaatcgttttagggtttttaggaattgagggtaatattggggaataggtggatagatgtataagaaatagtattaaagaggttttttgtttagtagttatttgatgacgggaaagaagatttaggaggtaattgaaaggaagtaaagatgggttttaaaggcgagtttttataggttggattagaagaaagcgcgtatgtcgcgtattagtgatgtaatattattttggattttatacgggggaagtggtggatgggatgggtgtgttattgattgagggtgttagaagagttttatagtagttattatagggttatagagaaataaatggtcgttaggttatagagagttttttttagtttggatgggaaggtatagttttatagaggaggtttattgacgtttgggtggtagaaggtatagaggtttttatatcgatagtggttttttttggtaaaatgtcggtagatagggcggtcggatttgtttgtgaataagtgaaaatggaatagttaaaaatttgagtaataaagaaaataaatataatgaaacgtagagatagaaggagaattgattttttattttttattatttttaggtattttggaatggtagttttttttttgggagaaataatattgaggtttatttttgttttaaaagtaaaaaggaaagtttagagaagattgtgaatgattttttgaaaattaggttattttgggagtaatgggtataataaaatggattttattttttataatttgggggttatttttgggcgggtaggtatttttgataagagattagtttttgagttttcgagggtttttttgttttttgtgaaagttttttttggtgggatttttatggtttggtttcggaaaaggaggttttgtattgattttttattaattacgattatatgggttagatttggggttaagtttttttcgaattgggtttttattttaaggaggaggtgggagatttagtagtggtggaattagtggtttttttgattttggaggatttttgtgaagagttggagagagagagagagagagatatagaaaggtgtttaatgggtagttgaattttgataaatcgtgattaaaaaaattttttttattgaagaatagtatatataaagatatattagttttaagtgtataatttagtttttataaagtagatatatttgagtttttattattaggtgaagagataaagttttattagtattttaaaagattttttttttgtgtttttttttttattatttatttttttttttaaaggtaattattattttgatattataggttagtttttgtttgtttttgaattttataaaaatggaattatatagtttgtatttttttatgtttggtttttttcgtttaatattatgtttgtgagatttatttaggttgtttgtagtagtagtttatttattttcgttgtagtgtagttttattgtatgtatatataataatttatttatttattttattgatgatggatatgtgggtggtatttagtttggggttataacgagaaatgttattataaatatttttatatatgttgttatatatacgtatgtatttttgttgaatatatacgtagtagaggtattattggtttataaagtatatgttatgtttaagttttatatataatgttaaattttttttttatagtggttatattaatttgtatttttattagtagttgttttatagttttgataatatttggaattgttaggtttttaaattttgttatggtgagtgtgaaaagtggtggttatttttttgtttggttattattatttatttaatgagagattgggttttgttatattgtttaggttggttttgaatttttgggtttaagtgatttttttattttggttttttaaagtgttgggattataggtatgaattattatgttttgttttgtttggtttttattgtggtaaaaaatatataaaatttattattttaattatttttaagtgtatagtttagtagtgttatatatatttatattgatgtgaaatagatttttaagtttttgtttgttttttgagatggagtttcgttttgtcgtttaggttggagtgtagtggcgcgattttggtttattgtaatttttgttttttgggtttaagtgatttttttgttttagttttttaagtagttgggattataggcgtttattattacgtttggttaatttttgtatttttagtagagatggagttttattatatcggttaggttggttttgaatttttgattttatgattcgttcgatttggttttttaaagtgttgggattataggtacgagttattatgttcgatttttaaaagttttttattttgtaaaattgaaattttgtatttattaaataaaatttttttttttttagttttttttttttagtttttggtaattattattttattgtttttttgaagttgattttatttttattttttgttttgataattttgttttgttatttaggttggagtgtagtggcgtgatttcgatttattgtaatttttgttttttaggtttaagtaatttttatgttttagttattcgagtagttgggattataggtgtgtattattatgtttagttaatttttttatttttagtagagatagggttttgttatattggttaggttgttttcgaatttttgattttaagtgatttgtttgttttggttttttaaagtgttgggattataggcgtgaagtattatgtttagtttttgaatttgattttagatattttagataagtggaataatatattatgtttttatttaatataaagtttttaaagtttatttatgttgtagtatgtgatagtattttttttttttataaggttgaataatattttattgtatgtatacgttatatttatttttttattagtggatatgtgggttgtttttatttttttgttattgtgaatattgttgttatgaatatgagtttgtaaatattttaagattttgttttttatttttttttttttgatatatatttggaagtaggagttttggggtaattttatttttaatttttttgttatttggtagttttatttttaattaagaggaatttttttatattgttttttatagtagttttattattttataattttagtagtagtatataagagttttaattttaaagtggtatatttttattttgtatttatttgataattaatgatattgagtatttgtttatttagatttttagtttatttagatttttattttaataaggtgttttgtgtttttgttaattttttaaatggtttgtttggaagagttttttatatattatagatataggatttttatttgttatatttattgtaaatattttttattgtatggttttttgttaattttttaatggtattatttggtaagtttgtattttgtttttttttttttttgagatagttttattttgttttttaggttggagtgtagtggtgtaattttagtttattgtaattttcgttttttaggtttaagcgatttttttgttttagtttttttagtagttgggattataggtatatattattatgttcggttaatttttgtatttttagtagagataggggttttattatgttggttaggttggttttgaattgttgatttcgtgattcgttcgtttcggttttttaaagtgttgggattataggcgtgagttattgtatttagtcgtaaatttatattttttaacggagttttatttattaattttttttttatggttagtgtgtatacgtgtattttttgtttgtttaagaatttttagttatttttagaaaatatatttattttttagaataattatttttttattttttatatttagatttatagtttatttgaaatagatttttgtatatgattatgagtgtaaggtgaaattttattttttttatatgaatatttaattgatttaatattatttattgaaaagattaattttttagttttatttttattataaatgaagtgtttatatatgtatgggtttgttattggatttttcgggatataagttttattgatttatgtttattattgtttttaaattgtatcgttgtaattattgtagttttatagtaagtttttttttttttttgtatttagagataggattttattatgttgtttagagtggttttaaaaatttttgggtttaaaggattttcgtattttagttttttgagtaattgggattataggcgtgtgttattatgtttagtttataaattttgatatttatagtaagtttttttattttaagattgttttgatagtcgttttgatattttgtatttttttataataatgtgtatttttataaaaatattatgggtgttttgatttggaatgtatgaaatttgtttattaatttgggaagaagtgatatttttataatattgagtttttaaattagtaaatatataatttttttttatttatttagggatggaatttttgattttttatttttaagttttttttgggttttatttttttttttgttgttttttttacgatttaatataaggattagggtttttttttttttatttgatttagggtcgttaggttttttattggttatggggggagggtttagaaggttgggtggttttaagagtagatatgaaaatatggttattagaatggattaaaggattgatgattttgtttttaggtgttttttttgtattatttattttttaatttaattagtaaagttaggtatatttttagtagttttgggagtttttattttatttatttgtttttttttttgtaaagttgttttagggtttgtaaaaagtagatatttaattaaaggggataatgtaggaaaagatattgataattttttttttttatcgtatcgtcgttatttaaaataatttaagtgtttttagatatgaattaattttttattttaattgttggttagaggattagtttagagaaagttgtatttgtatttttttagttaaagtttggatataaattgttattttagttatcgtaatttgtaatatttttattattttttttttttattgttttgcggttgcgtaaaagagttttttattttttttattttcgttttttttagaaaggtttggggtcgtattgaggttgatggttttagtaagagaatttttggtttaaggttttatttgggagagttttatttttatttttttttagcgcgtgcgtttttttttttttcgttatagttttttttttcgtattttattagtttttagttttttgttcggacgggtttgataggtatgtgtatattttttttagattttttatcgatgggatttttattttttttatttttagttttttttcgttcgggtagcgggggttgttgttgtgtcggtggttggtgatgattttgtttttttcgtttcggtatcgtgtttgcggtaatggttgtagcgggatttggagggtagtgaggaaggggtacgcggggattttgttttcgttttcggggggtcggtgggtagtaatgttgaggttttcgttattttattttcggaaggttgcggagaatatttgcggcggtcgtatttcggagttaattgttttttttcgtttttgttaggtatggcggtaattttatattttttttttgttgcgtttttataaatgttttgaaaaaattattttttttttttttcgttggaaaatattataattagttttttagagtgtgttatagagttaataggttttcgggttagagggtttgagaagaggattgtcgtatcgtaagatcgttatattcggttttcggttattatggtaatagttgtaggtataatttcgtgttttttgatttttttttaaaagtttttgtttcgtttgggttttttttttcgttcgtttttgtatttatgatttgtaaatttgttttttattatcgtttttataaggaatttgggttttaataggtcggtatttaggatttttagatcgtcgtttttttttaaagatttttgatcgtgttttcggtgtagtttagtaatttggacgtagtttcggttttttattaaggttaagttcggggttttgtagtatagttttagcgtgtttacgtttttttttttttaggtagtaggtttcgtttttcgtttcgtcgttttttttaggtgagtggtaggttttttcgggagcgtaaggtagtgatgatacgcgttttttttttttcgaacgcgagttggtagcgttcgtgacggagttagtttggtttttttacgcgcgttttttttttcgtcgtcggggcgttttttcggtgttattggtttttacgtgttagtagtttatttcgtattattttttcgtttcgtttttggagggaagtgattatatttttttcgttcgttttttatcgtcgtcgcggcggtaattttgtcgggttcgttcgttgacgttatttgttagtttcgttttttttagggtttcgggtttttgcggcgggggttgtttcggggggtagttagttgaggcggcgggagttcggcggagggcgggttaggtgattggttcgggttatgtcgaggaagaagttatttagcgtgaagtagaagaagaagtagttgtaggataaacgggagcggaagagaggttagtgcgggagcgggaggagggggcggggttcgggttttcgtatatttggaaggaggggtgtgttcgttgtatttttggggatcgtgggagggggtcgtgggatcgcgttaattttcgcggtttatcgcggaggggattttttattttttttatatttggaaggggtggggaaggatggagagttgggggaggggaatttttttagttagtacggggcgtcgtttttattgttttttgaaggagtgattttttttacgtatattcgggagggttttaaatagggtgtttgggaggattgaatatcggaagaagttgagtgggatgaaagggagttaggtcgatgggggagagggttttatggtttttgagagttggttagtattggcgttatcggttttttttcgtagggttttaagatgggttgcgttttagttttaatagtcgtagcgggagtcgggagcggcgagaggaatagatcgatatttcggacggggagtttgtgatttattatattcgtaggtttaattagtagtttttttaggggttgggtttacgaggttacgatttaaatcggtgagggtgggagggggcgttggtttcggttttttcgtttattcggaagttagagttttgggggaaagcgggttgttattggtgaagacggtgggtttgggatgttatagtttttcgttagttattcggttttttatagcgggttatagtttttttttttagaggggttggagagagttgggtttttagaaggagaaggttgagtattgtttgaaagaaggatttgggggaagtttgatttgagagaggagatttgaacgattttggagagaatggtttgcgaagttgattgtataagaggggagaaaataggagtttgtggttataggattgttttggatgtttcggtttttgtttttttagatatcgattgtattttgagagagatagtagggaggaggtagagaggagaaagagagtagttcgggagtaagttttatagtcggttagtgttgagttgttggagttggatattcgggaggtgtattagtttggtttaggtgagtgagagtaagataggtattgggttggggaaggagtttggaaaggtaaaagtcgattgtgaggaaggaggggtttgggatgtatttttgaattttgaagatttttttatatttggatttttttttgaatttttagttttggatttttttcgacgttttttttggagttatgagatgtttaaggagtaattaatgagttaagaggaacggagtttttaagattattttgggaagatttatggggtttatttttttgagaaatttagttattttgagtataatttggaggtgatagtgtattttagggataggagtggggtatagtgatttatggttaaattggtttgggattaggttggagagggattttgtttttagtttttttttttgattttgtttttttagatatggaggtagttgtggcgggtgttagagatgtttgatatcgttttgtttattattgatattcgatatttagtgagtattagggataagggtgggtaaggaggagggagaaaggttttttaggggtaaaggttagaggtaagagttgggagatagagaggtatttatttttttgtttttttaatttttatttagtgttgatgttcgtagttaggaatttagttttttatttttttatagtttgttattttttttttggttagtttatttttttttttaaaatagttatgttttgttttttagtttattatagattaatagaaaatttaagtgttggagttttagggattttatgaatgtagttggggatttttttttgtttagtttaaagatgtttttttttttttattttatttttttagtattgttatattagttgttatagaatttatttggaatgttagagtagtagttaaggttgtagattgttgttggattgttttgtgtgaattttagttttgtaattttatttttgttttttagtgggagaaagggaggtttgtgaggattatttaggttggaggtttttaataatatgtatatatatatatttatacgtatattatgtgtatattaatatatataggtatgtttgtatatatgtttatagttatattaatatataaatatgtatatatgtgtacgtatttgtatgtatgtatatatgtacgtgtatatatttatatagttgtgtatatataaaaaagtagattaatttttattttaatttttatttttgttttcgattttagtttttattttagtgtgttaagtgatgttgtttttttgttttgttttgggtttatttttatttttaattatgatttataggaagttttttgagatttagaagtattattaatttttgttttgtttttgttttttagtttgtttggtttatagtttttagtttagagtttgttattattagggttttgtttttgagttatatttgttgagtggggagttggaggtagagaattttgggttgatttttattgttttatttttttattaattttgttttaggttgtgaatttttcgttagtattttatgagtatgtgattggagaatttggattggttttggtgttggttttgaataaggtggatttggtttcgttagtttttgtggttgtttggaagtattatttttattaatattatttttagttttacgtcgttttttttatttttttttttcgggattttcgtattttataggattttagtagtggtgagtgggtaatgagagagggtaatttgggagaggtgagttggtaggggataaaggggagaatagagaggtttattgataagggggtatttggttttgggtttaagggtggtgggagagatgagaggtttaagttcgtgtgtttatttttttgtgttttttgattttagttttgaagaagagtcggaggcgggggagaggatggattcgggttttggggttagagtagttgttgagagtttgtgaagttattattgtggggaaaggtatgtggtttttagaggagggttgtaggaggatatgggggagattaaagatgtagaattattttgtttattttttttgaagttaatttttttatggtggatatgtgtaagaggttaggggaagggatagaataaggagtagattgatttggtgggacgagaggtagtaggtagttaggagttttagtggtttgttgtttttagtttttttagtattttttagaagtttagagaaacgtgcgtgattttagggagggtagggttaaatgatttttgggagattttttgatttgtttttatttaggttggtattgtataattttagagggtgttagttatataatttgtgtagggtatagtatgtgttattatgtatagtagttttggggagaatttttttaattttttttttttttgagtagtggatttgagtagttggcgggagaagattgttcgggatgtggttggggttatttggggtaatggttttggggaggaggaggaagaggaggatggtttagtagttttggtggagtagtagattgatttagtaatggagttaattggtttaatttaagagcgttataaggatggggtggtgattatcggttgtgtgggtaaggaagtggtagtttgtgcgtggtggtttttaaggaggtatagagtttttatattcggagaagagagagggcgattaggttttattaggttttagggtgtttgaggggtgatttttgttagtggcggtgggtaaggtagaagaggcgtttgttgtagtggaaggattatgatagtttgagttaaattttatttttttttagttgtgaggttttgagtaagtgattttgttattttgagttttagttattttgattttaaaaataaggatattgatatttgagtaaaagaatggatgacggttatgtgtgagggtttatgtttatatagttttagcgttttgggaggttgaggtgggaggattgtttgagattaggagtttaagattagtgtgggtaatatagtgaaattttatttttataaaagataaagaaaattagttaagtgtggtggtatgtgtttgtagtttttgttattttagaggttgaggtaggaggattatttgagtttaagagtttaaggttgtagtgagttatgattgtgttattgtattttagtttggttgatagagattttgtttttaaaaaaaaagaatggatgtgaggaatgatgggaatagtgttaagagagtgtaagaatgtttgataaatagtgataataataataataattattattgttaaaatttagtatttatatggtgtttattatgtaataggtattgttttaagtggtttatataaattatttgaattgtagtaattagtttgtagtatagtgattattaaattatagtaggagtttagtaagaattagtatttttttaggttttaattttttaagtttgttgttaaggagaatttttttttaagggttttgttttagtttatagtggaggaaaaaggaatgtatgattaggatttagggttcgtttttatttagggtgggagaggtaagaagagattttggataagttatggtattcgaggtgatattggaattaaaaagggtttaatttagaataaatttgggagtgtggagtaggtagttgggttttttggaagtgttttgatttatttttgtgttttttttgtttttggaagaatttgttttattgttgagtgattgtttttttttttagttattttattcggttgttttttttttgatttttgattttagtttttttgttataaggagtttttgtttttttttttagtagtttttgttttagttgatttttattttaggtggtgtgagagggagagtgtttgttgtggtataggtatttttgagtttggatttttttttagtttttatttatttatttatttaataaatatgtattgaatatttaattaggtgttagatattttagggatgggatatattgttgtggaaatggtaaaaaggtttgtagatttatggagtttatttttttgtgagtaaatagattttgtgattcgaaattatgtaggggtagtgaaggtaataaagtaatgaaaggggatagagagtgattgagaggagaggtgtttagggaaaatttttttgaggagagaattggatgatgagatgaagtgagttatttagaattgtggggaaagggttttgaggagggaatgggtttggagattttaggattagtaagagtgtttaggggattggagtatgggagttaggataaagtattggggatgaggttagtaagattattagggtttatattatgtagagttttgaggttgtgatagttattttggattttattttaagttttatgagaagttaagggtaggttttgaataggggaatgataggatttgattttgttttttataagtttattttttgagtagagaataaatgatggggggtgggtaagaaagggagtagagagagtagttgaggttattttagtaatttaggagagaaataagagttgtttagagtaggatgttggagttggaggtggtgagatagggtcggaagtatgatatattttgaaggtagagaaaatgagatcgttgatggtttgtagttggtacgtgaaggaaagtgaggataaagaaggatttttaggtttttgttttgagtaattggaaatattgagatgggaagattgggggagaagtagatttgaaggttttggggaggagaggggaattagaaatgaaattttagattttttttaaatatttttagtggagatgttgaataggtagtgggtaagtagttagtagtttaggggagagaagaggacggaaatttgaatttgggaaagatttaaatttggggaattattgatggatataagtggtatttaaagttataggattaggttgggtatagtggtttatgtttataattttagttttttgggaggttgaggtaggtggattatttgaggttaggagtttgagattagtttggttaatatggtgaaattttgtttttattaaaaaatatagaaaattagtcgtgtgtggtggtgcgtgtttgtagttttagatatttaggagggtgaggtaggagaattgtttgaattttggaggcggaggttacggtgagttaagattatattattgtattttagtttgggtgatagagtaagatttcgttaaaaaaaaaaaaaaaaaagttatggaattggatgagatgtaggagagaaaggaaatagttggagaagaggaggttaaggattgagttttaggataagttagtatttagttgggtaaaggatagtgagaaggaggaaaattaagggagcgttttagaagttaaatgaagaaggtgtttgaagaggaaaggaggaattagttgtgttaattgttgttgataggttaaatgagagaatagagagttgtttagtaggtttggtaatgtgaagattcgtggttttagtggggtggagaaagttaaattggagtaggtttatgagagaaggtgtaataattttatataatattgtgtgaaaagagtttgatttaatagtatttatattgtataattttagttttattaagtttgaaagttgtaaaattaagttgtattgttgagagatatataggttataaattaaagagaaatgtaaggagttgatttttttaaaaggataaagtttgtatgtatagagggagaggattatgattaagaaggatgagtggcggtcggtatggtggtttatttttgtaattttagtattttgggaggttgaggtaggcgtattatttgaggttaggagtttgagattagtttggttaatatggtaaaattttatttttattaaaaatataaaaagttagttaggtgtggagtcgtacgtttgtggttttagttatttaggaggttgaggtacgagaatcgtttgaatttgggaggatgaggttgtagtgagttaatatcgtattattgtattttagttcgggtgagggagtgagattttgttttaaaaataaaaataaaaaaaaataaggatagatggaatatgttgttatatattgggtggtatggggtttattaggttgtatatgtatgttttgtgtatttttttgtatgttgtagtttatagttataaagaagatagtaggaagaaatggtgaaaaaagtaggtaagttttttaaggagtttttttgtaaagcggatagagaattaggtttggtggtggtcgttaaaggagaattttttttttttttttttttttttttttttttagatatttgtatgtgttgtaaagagtgagtatagtggtatatttttttttagttatagttagttgtttaggggtagtgttgaatgggtagagttggattttatagggttgggattttgttaggtgagtaagatagaggggagaagtgggattagggagttttaggtttgtgaacggttttggttgaggagttggattatgaaatttgagttaagtaagaaggaaattgaggatacgagttgggtattgtatagtgttattgtgttaaggttaggggttaaagatttattggtatggagtaattagagtaagtgagttggaaagatgagttgttagggtagagaggggtgtttggaattgaggttttggagttgtgaagtgataagatgtaggtattattatgggagtgggtagttgaggtggggtaaaggagatgttttgtggaagggagatgaaggtattgaagttagttagaaatataaaaattggtggtggtgagtgagtagagtggtagtgagttttaaggtttttagttttttttttggataagttatcgtaattattattattattttttgagatggagttttttttttattgtttaggttggagtgtaatggtgtaattttagtttattgtaattttcgttttttgggtttaagtggtttttttgttttagttttttaagtagttgtaattataggcgtttattattacgtttagttaatttttgtatttttagtagagatggggttttattatgttggttaggttggttttgaagttttgattttaggtgatttattcgttttggttttttaaagtaattacgttgggattataagcgtgagttattgtgttaggttaagttatagtaattatgagatgtggattattggtattgggtatttattgtattgtaggtattgatttatataagttgtattggttattttatttaattttgattattttgaggtagggaggtgtttatattgtaaaatgaagaaatagaggtttagaaagttagttgttttgatattataaagttggtaagtggaagggttaggatttaattttggtagtttagagcgtgatttgtattttgtaatattatttttttaatttttgagttttagttttttttttatttataggtatagtattaagttttattatagagtagaaatttgttaaacgttaattttttttgttttttttaggtttttttaatgtgggaaagttttcgttgattaatgggttggtggggcggaaagtcgtgagtgtttttagaatttcgggttatattcgatatttttagatttatttttttattttttttgtgaagttttgtgattgtttaggttttatttttttattttttttgtttaggtagttgtaggtatgacggggagggtgggtaagggaaagagagaaggtgggatattgaggaaagtattgagtgtttattttttttaggttttggtagggatttattttatcgtttagatttaggagttttatattgttgtgggttatttggtttttcgaattttcgtgtaggttttgttttatttgcgttatttagaggttgaggattttttagcggaatatttttggtgtgtttgggatatttgtgaaggtgagttttatgtgtttggtttcgttttatttggttttagttgtttttttttatttgtttcgttttttatttttttttgtttttttttttttttttagagattttgttattgatgaagttgttgtttatttatttttagatttttgttgtatagttagtaagatttttggtttggaatgttttggggaaaattggaaggattgtgttatgggagtgggagtataattggtatttggttaatgttttttttttttattatttttttttttttttagtttgggtagagaaacgtggttataagatagttaaggcggttcggaatgatgtgtatagagtagttaatagttttttgcggttggtagtggacggtcgttttagtttgtgtttttattttttaggttatagtgaatagaaaggttagagtttagatatttttttttagttttttgttatagcgtaggtaaaagggtgtgggttttgtggttagagagagggttaaatttggattttgtatttgttggttagttttgttatttaatatttgtgatatttttttgatttgtaaattgagggtaataattgatttttagtatagtgattgtaaagattgaagttgatgtgtataaaggttttgtttagtaatttgtatataggaagttgaatgaatggatgaatgaatgaatgttagtagttttaaagattattgttatttttagtttttgttttttttttatttttttttggttttagtttttgtttaaaatttttttttattttttttttgttttggttttttaggtatttgggagttttatttagagattacggagttggtggttttgtagggtagggtggggttagtaggtgacgaggaggaggaggaagaggaagagttgagtagtttttgtgaggaggagggagaggaggatcgggatgcggatgaggagggagaaggggatgaggagattttaatttcggttttagggtttagtttggttggtcgaaatttttatgttttgttgggtgaggatgagtgttgagtttttcgtttagcgttatttttttttttagtatttttgtttttggattgatttgggggtattttttttttgttattttaattgtgaataaagattgtttgttttgtagttttttttttagatgaattgaggtgagagcggttgttttaggttaatagttgtgggaggttttttttttttttttttttttttttttatgtattttttttgtaagggaaagtttttttaggagtttagtaggtttttagtttttgaaatttgttttttttatttatttttttattttgtattttaggaatttcgttatttatatggggaggggaggtttaaatttagtttttttttggagtttgtgttatttttcgatttgagtagtagttttgtgtgttttttgtcgttagatttgtttattttaggagtttttgggagaaggaatagtaagagaggaattgtgttttaagttgatgttttttaatgagatttttataggaattgtttaaatttagtaaatatttattgagggtttattgtgtgttttgatttgtgttgagtattaagtatataaggatgtattattagagtttgatttaaatttgaagtttggttatgattaaaattttatttttaggtatttaagtttttggattaagaagggtgaatgatgttttttaaattttgggggtttatgtagtataattttaggattttatgttgatataaatttttagttaaggtaaaacgtttgtgaaaatgttgattaaatgtgtacgagtagttttaattattggtgaataattagcgtgtatatttatgatttgagtagaatagttttttaagtatagtgttaagttttattgtttaaaagtttggtagttacgagtatttgaggtatataggggcgggtatagaattagttttttgaattttatttattttggtttgggggtggaataaagatgatttagtgtagggtttgagttagaatttagtaggtggttagaattattttagggttttattttagtatttcggtagaaattagttttttcgtgagttagggtattttaggttttgttgtatatttttttgttaagttagtagttagatttttagattgaatttttttagaaatgggagaatgagtttttttattgattgttagtgttgtttgtattggatgatagtaaaaagtgtagttggataggttgtttattagatggagtgagaagtattagattttttttttttttaaagtagatttttttaggatttgagttattgggtagtttttttaatgcgagtagatagattttgttaattaaggagtaaaggaaagtatatttaaagaggttaaggtgtttggttatatattgttttaggtttatttttattggttttagtgtggatataatttttggaatttattttagtgtaaagtttaaataatattagtatgagaatgtatttgaaggttttttaaaatgtgttagataagaaagagaaaaggttttagttgagagaaaaatttatttgttttttatttggggttttttggttttattgatagaaaaggaaaaggggtttaagttaagtttattttgagggtttatgatgtttagagatgtttaggggattttttcgttgtaggaggtggggtgaggatattggatttatttttttaaaatgtggagagaaaggagaaaaattagaattttatttgtatttttgttttttgtgttgtttatttttgtttgtttttatttttttttattttaggggttttattaggggtatttgggagagtttaggggtggggatgaagaattgattgggagttgaggaggggggatttttatgttgaagatttggtaggaggtaatttttgatatttttatagggttagattgtaaaattttttttatgatttgttgattttataggataatagtaataggaaaagaattgagggacgtgtagatgaggatgaatagggttttaatattagtgtttgaggttgaggttagaattgattataaagatataggaaattaagggtttagttttttttttacgttgaaatacgtatttttttgtttgggttatgtttattatgtgaatatttgattatggaggtttggggttttggtggtttttatagttggttagttttttgatggagagaaattagggttttttttatttatgttggaattttatttagatgttaatttttaagtttttttttttttagatgggattatagttttgtttttggaatagggtagttgtgtgtggtttaggatagtttaattatttggttttttgtttattttttataattattgatatagttaataaaaattggttaaaaataatatatgttagatatatatttttgagttttgggataataattaaaattgaataaggtaatattttatttttaagtaatagagggtaggaatagaataataataatataatataatagttttatagtagtatgtaaattataaaagtattattttacgtgtttttattgaattgttataattaaataagatggttagtattataattattttaaggatttatttatttatagaatatttgttgagtaattattatttgttagttatttttaagtggtaagtgagatagaaatggttttttgtggtatttataatttattggagaatggaaatataattataaaaaaaaagtgtgataagttttgggagaagggtggtataggattttgtggggtagtggtggttttatataggagggatattgggatattgattaggaaggagtgggggatagggttagaagttgtattagtataaagttatgttagattgttaaaataaaataaatataaaaaattagtagtttgtggtaaagaattgttataggaatagttagtaggggtagttaagttggttttggtgaattaggggaagcgttttagaggaatagatgtttatgttgaggttaaatgttggataggagttagttagatagggaaattgtattttgggtagaggagatagtaaaggttaagaaatatgataattttggaagattgtaatttgtttagaggtagagggtgtaaaggagaaatgaggaaaggtgaagttggagaggtgggtttggtttagtttttgttgggtttttttagtcgtgttaaagatttagattgtatttagagggatgttgaattttaagtttaagattgaaaaggtgagaatttgttttagattattatggttgtagtgtggagattggtttggaaaggggagaaattagaggtttttatagttattttagggagagagaatgaatattagaattagggtaatggaagatggaaagaagagaaatcgttttatgggttgtttaggagatagaattgatatgttttgggattgttttgttgtgtaggggagagagataagttaagagtatatattttgtttttgatttggtaattgggtgggttatgggtttgttttttgagatagttgtttatagttatattatcgtaagcgttttaaattttattagagatagtttatgtaaatggagtttggggaaagagaggtcgtggttggagatagagatttgggtattattaatatataggtgtggggagtagagaaggttgaggaagaaagtaggaaatatataaaaaggagagtagggaaaggagttagtgagataggaaaaatttagtaacgtggtgtgatgaagttaggggaggaaggaaggaaggaagggcggcgtggaacgttgttgatgggtggtggcggggaaaatgaacgagtatttattagtaacgagaggggtttttatggttttggtgggagtatttttttggagaggtggaattagaagttttagatgttagagggttaaggaataatttggaggaaaagcgtaaaggtagtggaggtgaggagagaatttttaaaatgtttggtagtgattgtaatgaaagaaaaaaatggagggagtagagtatatgtagttgaggaatttttttagtttggagtgtgttaatacgatgttaggaagaaggattaagtgaaggagaaaggtgaaaatgttggaaggtggggtttagtgatgaaataaattttggggataggtgggcgtggtattgagagttttagtgaggggagtgtttttaggtaggcgtcggtggtttttgttataggagggaatagcgttgatatttagttggttcgtattgatacggtttaattagtttgttaaaatatgtttgttttagtgttagtaatatacgagtaattgtaatatgtagtaaaaattataaattttaatataaatttagtttaagttaattaagagatcgtaatagtcgttggtaaatggatttttcgttgtatttgagaagttttgtagcgttatttgtcggtgtcgtagtattattgtaggttgagaggttgttttgcgtttttattttgaagtattttgaaattgtttgtttaaattattttggaattatggagttgttattgtttttgaatagtttagtttttattttgattttattgttagtgtattgtcgtttttgtgttagtagtaagttttagtgttttaatatttataaatataaaaatttttaataaaatattaaagttaaatttgaatgaagagataataaagtttggatatgtttttttatgtgttttttgatatattataaatgagaattttttgattttttaggagaataaagaagaaatattaatgagttgtagttaggaatgttttttgttattgtgtaaaaattagaataatatggaaattatttgtaattttttattttgaaaaatttttaatatagaaaaagaataataaatatttaaatattgaaagatttaataaattttatattttgttatatttgttttattagtttttgttagtttttgtattaatcgatttttttgtttatttatttattttttttgttgttattattttttatttttaaaaattttaatttttaattgtaaattggtaaattatagttgtatatatttatggcgtataaagtgatgttatgatttatgaatatattgtgggatgattaaattaagtaaattaatatttattattttttttttttttgagatggagttttatttttgttgtttaggttggagtgtagtggtgtaatttcggtttattgtaattttcgtttttcgggtttaagtgatttttttgttttagtttttcgagtagttggtattataggcgttcgttattatgttcggttaattttttgtatttttagtagagacggggttttattatgttggttaggttggtttttaatttttgattttaggtgatttatttatttttattttttaaagtgttgggattatagacgtgagttattgtattcggtttaatatttattatttttaaatatttattttttttgtggtgagaatgtttgaaatttattttttatatttagaggagggaatatgttaaaaatgtaaaaaagatatttatttttaatatttatgaaatgtttaagaattatttattatatttattttgttgtgtagtatattttaaagaaaaagaaaagtttatttttttagtttaatgaagttttgtaatttttaattattatatttttatttattttagatttttagtttttggtaattattattttgttttttttttttttaagttcgattgttttagattttatttataagtgagaatatatagtatttgtttttttgtgtttggtttattttatttagtataatgttttttaattttattaacgttgttttaaatgataaaatttttttttaaaggttgaatagtattttacggtatatatattatatttttttttttttttttttttttttttttttttttgagacggagttttgttttgttatttaggttggagtgtattggtgtaattttagtttattgtaaatttcgttttttaggttgaagtgatttttttgttttagtttttagagtagttgggattataggcgtttgttattacgtttagttaatttttttgtatttttagtagagatggggttttatcgtgttagttaggatgttttcgatattttgatttcgtgattcgtttgtttcgattttttaaagtgttgggattataggtttgagttattgcgttcggtttatatattatattttttttatttatttatttgttgatgaatattcggtttgattatgtaattttattgtggttaatagtgttgtagcgaatatgagagtgtaggtattttttcgatatattgattttaaatttttttagtaaatatttagacgtaagattgttggattatatggtaatttttttttttttttttgagatggagttttatttttgttgtttaggttggagtgcgatggtacggttttagtttattgtaattttcgtttttcgggtttaagcggtttttttgttttagttttttaagtagttgggattataggcgtttattattacgtttaattaatttttgtatttttagtagaaatggggttttattatattggttaggttggtttcgagttttcgattttaggtgattcgtttatttcggttttttaaaatgatgggattagaggtgtgagttattgtgtttagttttatatggtaattttatttttagttttttgaggaatcgttatatagttttttataatagttgtattaatttatatttttattaatagtatataagtgttgtttttttttaattatttgaatttttttttttttttttgagatggagttttgttttgttatttaggttggagtgtagtggtgtaattttggtttattgtaatttttgtttttcgggtttaagtgatttttttgttttagtttttttattagttgggattataggtgtgtattattatgtttggttaatttttgtatttttagtggagacgagattatattacgttggttaaggtggttttaaatttttgattttaggtgattcgtttttttcggttttttaaagtgttgggattgtattgtatttagttttgaattatttgaaagttggagatatcggttgggtatggtggtttatatttgtaattttagtattttgggaggtcgaggtaggcggattatttgaggttaggagttggagattagtttggttaatatggtgaaatttcgtttttattaaaaatataaaaaattagtcgggtatggtggtatatgtttatgattttagttatttaggacgttgaggtgggaaaattgtttaaatttgggaggtggaggttgtagtgagttaagatagtgttattgtattttagtttgggtgatagagtaaaattttattttaaaaaaaaagaaatttgtagatattatgattatttatttttaaatacgttatatatattttttatataattataatagaattattatgtttaatgagttaataatttttaatgttatttagtattaaatttttttaatttgaatgttttttatagtatttaattttttttaagtataattattaaataaaaattgtatagatttatggtgtatagtatgatgttttaatatatagtttttaaaaaatttttagaataggaattaattaagttttaatattgtatttttttatgttttttttttatttttttttttttaatttataattatttagtttttttttttttggaattggatttttgaggatattagggtagttgttttttagattgtttaatattttagatttgttttattgtttttttgatgttatttaatgtgtttatttgtttttttgagttttgaggggtttttttttaattatttggttagatttaggttatttagttttgggattaattttttaaatttgttatatatgttatattgttttatattagaaggtatatgatatgaagttattttataagtagtgatgttaagtatgattgtttggttaggatggatacggttagattttttttgtaaaggttatgttttttttttggtaattagtaagtcgtttgtatggttttttgatattgtgtgtatacgttgaaaaatttttttttatcgttatttatagtgatttttgtttgaattggttattttattagaaattataaaaggtgtttttttaatttttttatttttatatttataagggtataattatttaggaaggagtttttttttattaattggaaaaagtagggttttttttaaatttttgattttaagtgatttatttgttttagttttttaaagtgttgggattatagatatgagttatagcgttcggttaaagtagggtttttttaaaaggtaaggtaaatgtttatttttttttattagtttttagaataaggtattggtatgatattaatttttaaaggtagaaaatttattttttttttttttttaaattatagatttagggtttttatttatttagtattttttttattttttgagatagtattacggtttgttgtttaggttggagtgtagtggcgtaattattatttattgtagttttaatttgttaggtttaagtgatttttttattttagttttttgagtagttgggattataggtgtatgttattatatttagatgatttttgtattttttgtagagatggggttttgttatgttgtttgagattaagtgatttatttgttttggttttaaagtgttgggattatattatgttaggtatttatttaatattttataattggttatagttattatttttttgtgttcgaattgtattttatgtgtttagtgggagtttttttttttttttttaatttgagatggagttttattttgttattaggttggagtgtagtggtacgatttcggtttattgtaatttttgttttttgggtttaagtaatttttttgttttagttttttgagtagttgggattataggtgtatgttattatggttagttaatttttgtatttttagtatagacggggttttattttattggttagaatgatttagattgggagagggttttagtgggagtttttttaagttaatttttatatttattttgatatattttaaaagttttgtgagtatttgtttgtttttgatataattagatgttttaggtataatttttttttatttttttagttttagatgtggaattagttattttttttttttttttttttttttttttttttttttttttttttgagatagagttttattttgttatttaggttgaagtgtagtggtatgattttagtttattgtaatttttgtttttagagtttaagtgatttttttattttagttttttgagtaattgggattataggtattgttattacgtttggttaatttttgtatttttagtagagatggggttttattatgttggttaggttggttttaaatttttggttttaagtgatttgtatttgtttgtttttagttttttaaattgttgggattataggtatgagttattgtatttggttaaaattagttatttttttttttttttttttttttttttgaggtcgagttttgttttgtcgtttaggttggaatgtagtggcgtgattttagcgtattgtaagttttgtttttaggtttatgttatttttttgttttagttttttaagtagttgggattataggtgtttattattatgtttgtttatttttttgtatttttagtagagatagggttttattgtgttcgttaggatggtttcgattttttgattttgtgatttgttcgtttcggttttttaaagtgttgggattataggcgtgagttattgtattcggttaaaattagttatttttttaaggaatattgattcgttttagtgaggaatggtttttagtgttgggagagttcgttgttatagaggtgttatcgttttaagttatatttagggtttaaaaaaaattatgaatttatattggtatttttaatttaaattgtatattataggtttttttttttttttggattttgtatttgtatattttttattagggtaatcgaaagttttggtttttaatatttttaatatatttatttattttttttttttataatatatataaaattattttaaaattgtattgggttaggtatagtggtttatgtttgtaattttagtattttgggaggttgaggcgggcgttattatttgaggttagtagttcgagattagtttggttaatatggtaaaatttcgtttttatttaaaatataaaaattagttgggtgtggtggtgggtatttgtaattttagttattagggaggttgaggtaggagaatagtttgaatttgggaagtggaggttgtagtgagttaagattatgttattgtattttattcggggtgatagagcgagattttattttaaataaataaaagaaatcggttgggtatgatgtatttatttgtagttttagttatttaggaggttgaggtgggtggattatttgagttcgagagattgaggttgttgtgagttatgatcgtgttattgtattttagtttgggtaatagagtaagattttgttaaaaaaaaaaaaaaaattgggaaataaaattttttagggtttttgaagttattttatgagtaattgagtgtgatgagtgtaggatttttggttttagtatttggttttatttttgttttttaaatatgttttttttattttaagatttttatttttttttgttttttggtttggaatattttgttttatttattcgttatttgtagttttgttatatttagtttttgttgatatattttttagaggggaatatgtgtttgatttttttttttttaatttaggtaaggtgagttttttttgtatgagtttttttatggttaatgagttttatataattgagtgtttattatttattcgttagtaaggttttaagatagtacgtttttttttttgttgattattttatttttagtatttataatagtattgtattagttagggtgttttagagagttagaattaattagatgaaagaattgttttatgttattataggggttggtaaatttaaaatttgtagagtaggtaggttagtagtaaagagttgatgttatagtttaggtttaaaggcggtgtggaggtagaatttttttttttttagggattttagtttttttgttttaggtttttgaatgattggatgaggtttatttatattgtggagggtagtttgttttatttaaaatgtattaatttgaaatatttaaaatatttttataaaattatttataatgtttgattaaatatttgaatattatggtttagttaagttgataaataaaattaattattataagtatttagtataaatgtataattttatgtttatatgtatatatatttttttatatatatatatgtatgtatatatatatttatgattataaaaagtatatatatatttatatatatagagagagaaataaaggaatgatttatgtattttataaatatattagaaatataaatttatagatagtagtagattttattacgatgtttaattttatgtgttaatttgtttgggttatggtgtttagatatttagttaaatattattttggatgtttttgtgaaggtgtttttggatgagatttatatttaaattggtgaattttaaatgtaatgagggtgggttttatttaattagttgaagatttggttagaataaaaggttgtttttttttttttgttttggttagaagtttttagtatattatttttggatttgaattgtaatttttttttgtgtttttagtttgttgggtttttttattagattttggatttattaagtttttataattttgtgaattaattttttaaaataagttatattttttttttttttttttgtaagtatgtatgtatgtacgtatgtatgtatattttatttttttggagaattttgattaatttagaaagtaaaaatgttttttatggtagggtgtagtggtttatgttcgtaatcgtagtattttgggaggtcgaggcgggtagattatttgaggttaggagtttaagattagtttggttaatatagtgaaatttcgtttttattgaaaaaaatatatatatataaaaattagttcggtatggtggtaggtgtttataattttagttatttaggaggttgaggtaggagaatcgtttgaatttggggggcggaggttgtagggagttaaaaacgtgttattttattttagtttgggtgagagagcgaaattttgttttaaaaagaaaattaaaattaaaaatgtcgttaattacgtttatgagataattattgtttattgtttgtttcgtgtttttgtatttttttttttaatttttttttgtttatatattagtaaagatggatggaggggaagattgaaaaaaatgttttttttagtttatattgttttgtaatttttattatttatttatgatgtgtttatttttttatgttaatatatatagatttttataaaatgatattgtgatattttattgtatatatatagtttattttaattattttggtattttttttacggtttttttttattatttattagtagatataatgttttaaaaaaatatttttgggtgggtgtcgtggtttatatttttaattttagtattttgggaggttgaggcgggtagattgtttgaatttagatattggaaattagtttgggtaatatggtgaaattttatttttataaaaaatataaaaattaggttgggcgcggtggtttatatttgtaattttagtattttgggaggttgaggtaggtggattacgaggttaggagttcgagattagtttggttaatatggtgaaattttgttttttttaaaagtatgaaaattagttgggtgtggtggtatgcgtttgtagttttagttatttaggaggttgaggtaggagaattgtttgaatttaggaggcggaggttgttatgagttgagatcgtgttattgtattttagtttgggtgatagagcgagattttattttaaaaaaaaaaaaaaaaaattagttgggtgtggtggtgtatgtttatagttttagttattcgggaagttgagcggggaggattgtttgagtttgggaagttgaggttttaatgagttgtgattatgttattgtattatgtttgggtgatagtaagattttgttttagaaaataaaataaaataaaataaaataaaaaataaaaaaattttaaaaatttttgtatttatttttttgtatattagagggagtgtttttataaatttttagttgttatgaatggaatgtttgtagtttttttaaattgtatgttgaagttttttaatttttaatgtgatagtttttggaggtggggtttgggttataatgaggtttggataaagttatgggggtataatgggattggtgtttttataaagagatgaagagaggttattgttttttttgttatagtaaggcggtgggatgggtcgggtgtggtggtttacgtttgtaattttagtatttgggaggtcgaggtgggaggattgttttagtttaggagtttaagattagtttgggtaatataatgagatttcgtttttataaaattataaaaatttagttgggtttggtggtatgtatttgtagttttagttattcgggcggttgaggtgggaagattagttgagtttaggaggttgaggttgtagtgagttaagtttatattattgtattttagttatttgggtgatagagaaaatttttatttgttaaaaaaaaaaaaaaaaagaaagaaagaagaaagaaggaagaaagatagagagaaagaaagaaagagaaagagaaaaagaaagaaagaaaaagaaggaaaagaaagaaaatgaaggtgggatatttgtgaattgggaatagaaaaaggatttttattaagtattttaattgttagtgttttgatatttgaattttttagttttaagaattgtgaaaaataaatttttgttgtttataagttatttaggttgtggtgttgttatagtagtttaaattaattaaggtattaatttaagtggaaatgttaaattaaaggttatgaaaatgtttaatattaataggtattaaattattttttttaaaggtgataagtttatatttttattaataagaggttaaaatattgttttaagttgggtgtagtggtttatgtttgtaattttagtattttgggaggttaaggttgatggattatttgagattaggagttcgagattagtttggttaatatggtggaatttcgtttttattaaaaatataaaaattagtcgggtatggtggcgggcgtttgtaattttagttatttaggaggttgaggtaggagaatcgtttgaatttaggaggtagaggtttcggtgggttgagatcgcgttattgtattttattttgggcgatagagtgagattttgtttaaaaaaaaaaaaagttttaatttatttttattatatgattggaggggttgaaaataattttatatttattgtttaattgaatttatttttttgtaaattatttatattatttatatgtttttaataatatattttttaaaattaatttgtagttggtatatgatggatattataattttattgtatatgttgatattgttgtaattatttaattggtttattttgtttgttgtttagatagagttaatttatgaagataggggaattgtaatagagaaagagttttatatatatagagttagttaaataggagattgaagttttattattatttatattagtttttttttaaatttgaaggtttttttaagatagtttggattgggtatggtagtttatatttgtaattttagtatttttcgagtttgaggtaggaggattgtttgagtttttgagtttgagattagtttggataatatagtaagatattatttttataaaaaatttaaaaattagttaggtgtggtggtgtatatttgtagttttagtgatttgggaggttgggttagggaggttgaagttgttgtgagttatgattgtattattgtattatagtttgggcgatagagttttaagaaaaaaagaaaaaaaaagatagtttgttgggtaggtggttagggaatgggtgttgttgattgattgggatgtaattatagggatgtggaaaatggttttcgtgtattgagtttatttttgagtggggttataggatcggttttggatttgggtggagttatttggttttttaaaatggaaaagtttgagttgggtaaggtggttcgtgtttgtaattttagtagtttgggaggttgaggtaggaggatcgtttgagtttaggagtttgagattagtttgaataatagagttagatattatgtttattaaaaatataaaaataaaataaataaataagtaaaaaatattttagaattaaaaaataataaaattggttaggtatggtggtatgtatttgtagttttagttatttggaaggttgaggtggaaggtttatttgagtttaggagatagagattgtagtgagttatgattattgtattttagttttggtgatagagtaagattttgttttaaagtaaataaaataaaaaataattgtaaagatattttaaaaggttatagtgatattattttataggattaattggggaagttataaattttgtgatttttgaaataatggcgggtaattgtttatttaagtttgtatttaggttttttttattttttttaatttggtggttttttattatttttataaagataggttagttttgggaagggttattattatttaaattgtaaacgaaattttttttaaagttagtttggtttttgtttaggaatgattaagtgtaatttggaggttaaaggtaagaaggagttgggttagattggatattttttaatgttataatttttttattgttataatttttgtaagggtggtttcggtgtttttattttttttttttttgttaaagttatattgatattttttttttattttttttttgtatttttatagtatattttttaatagaagttatagataatagaagagagtagtttttttgtgtgttttatatttatttttttatttttgttattgggtatggattttttttgatgaataagttttttttattacgagtttattttttttatatttagttttagatttatggaaaaagttttgttgagttaagttaagaagtttttttttttttttttttttttgagacggagttttatttttgttgtttagggtggagtgtattggcgtaatttcggtttattgtaattttcgcggttcgagtttaggtgatttttttgttttaagtttttgagtagttgggattataggtgtttgttattacgtttggttaattttttgtatttttagtagagacgttgttttattatgttggttaggttggttttaaatttttgattttaggtgatttaatcgtttcggttttcgaagtgtttggattataggcgtgagttatcgcgtcgggttaagttttttttgaggatttaaattttagatatttaaattagtggtttttttgttttttttgtatttatttttattatcgtgttttggattttaataggggttatgttgggtgagaggttgttagatgtttagagatattgaaatttagggtatgattgtggttaggaagaaaataagggtaagagaaagatgttagagataaattttttttttttttattttttttaaggatgagtttagtagttaggttttgggtgaatttgtttatttaggtatataaaaaatggattaatatggaaatgtttatatatttttttattagattagttaggtttatatagaaaaaaataaaaaaagttttttaaaaattgttattattatgatgatgtatttgttttgtgtttttgtttttttgttttattttgattttttttttttttttttaagagataggattttattatgttgtttagattggttttatatttttgggttgaagtgattttgtttgttttttaaagttttgagattataggtgtgagttattaattatgtttggttttttttttttttttttttttttttttttttttttgagacggagttttgttttgtcgtttaggttggagtgtagtggtataatttaggtttattgtaagtttcgttttttgggtttacgttatttttttgttttagttttttgagtagttgggattataggcgtttattattacgttaggttagttttttatatttttagtagagacggggttttattgtgttagttaggatggtttcgattttttgatttcgtgattcgttcgtttcggttttttaaagtgttgggattataggcgtgagttatcgcgttcggttattttaatttttttatggatagtgtgaagtagatattttaattttatggtagaggtgagaaaattgaggtttagtagtaatgttttaattggaaatatttatttataaatagataagattttaaaaagaaaaaaaaagtgatttatgcgattagtttttattttttagggaaaattttataaaatattcgagttgttggttataaatgttatgggtttatttaattttttacgtggttgtttttttttggttagtgaatattttatttagtagggaggttggatttggtttgttatttggttttcgtggtgtattttagattttggagtttgataatagttgttgtataattatgttaggaggttattagttttgggataatggttttttattagtttgtataaggtagaatagaaatatagtagttgagggaaaataaaaattttaaataatttagggatgggatttttttggatgagttatattttaatgagtatattaatgatttattatgtatgaacgttatgatgtgtgtagaagttatttttttttttttttttttttttttttttttttgagacggggtttcgttttgttgtttaggttgtagtgtagtggcgtgatttcggtttattgtaaggtttatattatttttttgttttagttttttaagtagttgggattataggtgtttgttatcgtatttggttaattttttttgtatttttaatagagacggggttttatcgtgttagttaggatggtttttattttttgatttcgtgattcgttcgttttagatttttaaagtgttggtattataggcgtgagttatcgcgtttggtttatgtataagttatttttattagttttaattgtttttaagattaagtattaatatgaatttaatatagaattagattattaaatgtttgtattataaattgttaaagtattatttttaaaaataattaagtataattagttatattgtttttatttgaaagtatataattaataatgttataagggtaaaatattttttttttttttttttttttttttttttttttttttttttgagatatagttttattttgtcgtttaggttggagtgtagtggtgcgatttcggtttattgtaattttcgtttttcgggtttaagcgatttttgtgttttagtttttcgagtagttgggattataggtattcgttattacgtttagttaattttttgtatttttagtagagatagggttttattatgttggttaggttggttttgaatttttgatttcgtgatttgttcgtttcggtttgttaaagtgttaggattataggcgttagttatcgcgtttagttttattatttgtattttgaataaaaattgttatttaaattatttttttttattatattttttaaaatttttaattaaaatattttataatgtgtataatgtattgttataaagtaatatatagtttaaaaagtagggaagattttttttattttttattttattatattttaagatttggggtatatgtgtataatatgtatgtttgttatataggtatatttgtgttatggtggtttgttgtatttattaattcgtgatttatattaggtagtttttttaatgttattttttttttaatttttaatttttttataggtttcggtgtgtgatgttttttgttttgtgtttgtgtatttttattgtttaatttttatttatgagtgagaatatgtagtgtttggttttttgtttttgtgatagtttgttgagaatgatggtttttagttttatttatgtttttgtaaaggatatgaatttatttttttttatggttgtatagtattttacggtgtatatgtgttatatttttttaatttagtttattattgatggatatttgggttggttttaagtttttgttattgtgattagtgtcgtaataaatatatatgtgtatgtgtttttattatgatttataattttttgggtatatatttagtaatgggatggttgggttaaatggtatttttagttttagatttttgaggaatcgttgtattgttttttataatggttgaattgatttatatttttattaatagtgtaaaagtgttatttttttatattttttttagtatttgttgttttttgattttttaatgattattattttaattggcgtgagatggtattttattgtggttttgatttgtatttttttggtgattagtgatgatgagtatttttttatatgttttttggttgtataaatgtttttttttgagaagtgtttgtttatatttttcgtttatttgttgatggggttgtttgatttttttgttgtaaatttgtttaagttttttgtagtttttggatattagttttttgttagatgggtagattgtaaaatttttttttattttgtaggttgtttgtttattgtgatgatagttttttttgttgtgtagaagttttttagtttaattagattttatttgtttattttggtttttgttgttattgtttttggtgttttagttatgaagtatttatttatgtttatgttttgaatggtattgtttaggtttttttttagggtttttatggttttaggttttatgtttaagtttttaatatattttgagttaatttttgtataaagtgtaaggaagggattttgttttagttttttatatatggttagttagtttttttagtattatttattaaataggaaattttttttttatgtttgtttttattaggtttgttaaagattagatggttgtagatgtgtggtgttatttttgcggtttttgttttgttttatttgtttatatatttgttttggtattattattatgttgttttggttattgtagttttgtattatagtttgaagttaggtagcgtgttgtttttagttttgttttttttgtttaggattgttttggtaatgtgggttttttttttgttttatatgaattttaaagtagttttttttaattttgtgaagaaagttattggtagtttgatggggatggtattgaatttataaattattttgggtagtatggttatttttacgatattgattttttttatttatgagtatagaatgttttttcgtttgtttgtttttttttattttgttgagtagtggtttgtagttttttttgaagaggttttttatattttttgtaagttggatttttaggtattttattttttttgtagtaattgtgaatgggagtttatttatgatttggttttttgtttgtttgttattggtatataggaatatttgtgatttttgtgtaatgattttgtgttttgagattttgttgaagttgtttattagtttaaggagattttgggttgagatgatggtgttttttaaatatatagttatgttatttgtaaatagagataatttgattttttttttttttaattgaatattttttattttttttttttgtttgattgttttggttagaatttttattattatgttgattaggagtggtgagagagggtaattttgttttgtgttaatttttaaagggaatgtttttagtttttgtttatttagtatgatattgattgtgggtttgttataaatagtttttattattttgaaatacgttattaatatatagtttattgagagtttttagtatgaagggttgttgaatttttgtcgaaggttttttttatatttattgagataattatgtggtttttgtcgttggttttgtttatgtgatggattatatttattgatttgtatatgttgaattagttttgaattttagggatgaagtcggtttgattatggtggataagttttttgatgtgttgttggatttcgtttgttagtattttattgaggatttttgtattgatgtttattagggatattggtttaaattttttttttttgttgtgtttttgttaggttttggtattaggatgatgttgtttttatgaaatgagttagggaggattttttttttttttattgattggaatagttttcgaaggaatggtattaatttttttttgtatttttagtagaatttggttgtgaattcgtttggttttggattttttttggttggtaggttattaattattgttttaattttagagtttgttattggtttatttagggatttaatttttttttggtttagttttgggagggtgtatgtgtttaggaatttatttattttttttagattttttagtttattcgtgtagaggtgtttatagtatttttgatggtagtttgtatttttgagggattggtggtgatgttttttttattattttttattgtgtttatttgatttttttttttttttttttttattagttttgttagtagtttattaattttgttgatttttttaaaaaattagtttttagatttattgattttttggaagggttttttgtgtttttatttttattagttttgttttgattttagtaattttttgttttttgttagtttttgaatgtgtttgtttttgtttttttagtttttttaattgtgatgttagggtgttgattttagattttttttgtttttttttgtgggtatttagtgttttaaatttttttttatatattgttttaaatgtgttttagagattttggtatgttgtgtttttgtttttattggttttaaataatatttttatttttgtttttattttattatttatttagtagttatttaggagtaggtagtttaatttttatgtagttgtgtagttttgagtgaattttaattttgagttttaatttgattgtattgtggtttgatagatagtttgttgtgatttttgtttttttatatttgttgaggagtgttttatttttaattatgtggttaattttagaataagcgcgatgtggtgttgagaagaatgtatattttgttgatttggggtggagagttttgtagatgtttattcggtttttttggtttagagttgagtttaagttttggatatgtttgttaattttttgttttattgatttgtttaatattgatagtggggtattaaagttttttattattattgtgtgggagtttaaatttttttgtaggtttttaaggatttgttttatgaatttgggtgtttttgtttggggtgtatatgtatttaggatagttagttttttttattgaattgatttttttattattatgtaatgttttttttttttttttttgatttttgttggtttgaaatttttttttttttttttagttagaaacgaggattgtaatttttgattttttttttgttttttatttgttcggtagatttttttttatttttttattttgagtttatttgtatttttgtatatgaaatgggttttttgaatatagtataacgatgggttttgattttttatttaatttgttagtttgttttttagttggggtatttagtttatttatatttaagattaatattgttatgggtgaatttgattttgttattatgatgttagttggttattttgtttattaattgatgtagtttttttatagtgttaatggtttttatattttggtatgtttttgtagtggtagtggttgatattagttgtttttttttatggttagtgttttttttaggagtttttgtaaagtaggtttggtggtgataaaattttttaatatttgtttgtttgtaaaggattttattttttttttatttatgaagtttagtttggttggatatgaaattttggtttgaaaattttttttttaaaaatgttgaatattggtttttatttttttttggtttgtaaggtttttgttgagagatttgttgttagtttgatgggtttttttttgtgggtgattcgatttttttttttggttgtttttaatatttttttttttattttatttttggtgaatttgataattgtgtgttttggagttgttttttttaagaagtatttttgtggtgttttttgtattttttaaatttgaatgtttttttgttttgttaggttagggaagtttttttggataatattttgaagagtattttgtaatttggttttatttttttcgttatttttaggtatattagttaaatgtagatttggtttttttatatagttttatattttttggaggttttgtttatttttttttatttttttttttttaattttgtttttttgttttattttattgagttgatttttaattattgatatttttttttttatttgattgaattagttattgaagtttgtgtatgagttatgtagttttcgtgttatgggttttagttttattaggttatttaaggttttttttatatcgtttattttagttagttatttgtttaatttttttttaaggtttttagtttttttgcgatgggtttgaatatttttttttagttcggagaagtttgttattaattttttgaagtttatttttgttaatttgttaaatttattttttatttagttttgtttttttgttggtgaggagttgtgattttttggaggagaagaggtaatttggtttttggaatttttagtttttttgttttggtttttttttatttttgtggttttttttatttttggtttttgatgttggtgatttatagatggggttttggtgtggatgttttttttgttggtgttgatgttatttttttttgtttgttagttttttttttaatagttaggatttttagttgtaggtttgttggaatttgttggaggtttattttagattttgtttgtttggatattattagcggaggttgtagaatagtaaatattgttgtttgattttttttttggaagttttgttttagaggtgtatttgtttgtgtgaggtgtttgttggtttttattgggaggtgttttttagttagggtatacgggggttaaggatcgatttgaggaggtagtttgtttattttcggagtttaaatgttatgttgggagaattattgttttttttagaattgttagataggggcgtttaggtttgttaaagttgtttgttgttttttgttttgatatgttttgtttatagaggtggaatttagagaggtagtaggttttgttgagttgtagtgggttttatttagtttaagtttttcggtttgtttatattgtgagtataaaattgtttatttaagttttaggaatggcggacgtttttttatttttttaataagttgtagtatgttaggttaattttaagattgttgtattggtagtaagtaaggatttatgggtatgagttttatcgagttaggtacgggagggaattttttggtttgttagttgtgaagattatgggaaaagtttagtatttgggtaggagtgtattgtttttttaggtatagtttgttacggttttttttggttaggaaagggaaattttttgattttttgtattttttaggtgaggcgatgttttgttttgttttggttcgttttttatgggttgtatttattgtttaattagttttaatgagatgaattaggtattttagttggaaatgtagaaattatttattttttgtgttggttttgttgagagttgtagatcggagttgtttttattttagtaagatgtttttaaaattttagagatgatggattttagatattaagtttttggttgtggtttggtttttttaagtatttaataagtttgttttttttaagtgtttttaaagattagaaatatttgtttttaatatatagggttgtaaaatttagaggagattggcgagtattttttttgtttgttttatatgtgtttttttgttagaggttatcgtggcgagtaggggtttgtgattgttttaattaaaattttggaaagttattttggcgttattagatgtttcgaggtttttaggttggagttttttttttttattgggttttttttgtaattttttttagtttattggttttattgttagagtatataggagttcggatatatatcgcgggatagtttgattcgttattgttttttgtacgtgttatatgagagggtttttttgagaatagaaaatgtagtgattgagtaggaaagggtgaaggaggaaaattagaggtcgtatgtagttaattaggtattataaaaatgttttttggaaaagtgtatttggagttggtttttagagaaaatgaaaagtttttttagagaaatgtaaaggttagagaaacgaagatttagagaatgaaaaggttaattttgtttatttagtagtttagggttagtttagatagatttatttttttgttgggtttatgattttgggtgagttttggttttttttttattttaaagttaatgttaaatttataaatgaaaaagaatatttaaaaggatgatttgggttaggtttagtggtttacgtttgttattttagtattttgggaggttgaagcgggtggatttttggaggttaggagtttgagattagtttggttaatttgataaaattttgtttttattaaaaatataaaagttagttaggagtggtggcgggtatttgtaattttagttatttgggaggttgaggttggagaattatttgaatttagtaggtagaggttgtagtgagttgagatttgttattgtattttagtttgggtaataagggtgaaattttgtttcgaaaaaaaaaaaaaaggatgattagtaatttggtaaatcgtagttatgtttgttaagtggaggaaaagtattaaatatattatgaaaatagaaatggtagttatgttaaataaataaatattatatatgtagggaaaaagattggtaataaatatataaaaaataaagttttgttttgatattttgaatttgagtggttttttatattttttataatttttaagttttatgaaatatgttgttttttttaattaaggtagtagtaatttttacgtacgtgatttttattgtattttaaaatttttaattaggtcgggcgtggtggtttatttttgtaattttagtattgtgggaggtttaggtggagaggattatttgagtttaggagttggagattagtttgggtaatatgttgaaatcgtttttataataaatataaaaattagtggggtatggtggtatatatttgtagttttagttatttgggagattgagacgagaggattgtttgattttgggagatttaggttgtagtgaattaagattatgttgtgttcggaattgttgggtttttagtttcgttgattttaagaatgaagtcgtgtattttcgcggtgagtgttatagtttttaaagatggtgtgtttagagtttgtttttttagatgtttagatgtgtttagagttttttttttttggtgggtttatggttttattgattttaggagtgaagttgtagattttcgcggtgagtgttatagtttttaaaggtggtatatttggagttgttcgttttttttggtgggttcgtggttttgttggttttaggagtgaagttgtagattttcgtagtgagtgttatagtttataaaggtggtgtattcgaagttgtttgtttttttcgtttggagttgtttattttttttagtgggtttgtggtttcgttggtttaaggagtgaagttgtagatttttatagtgagtgttaatagtttataaaagtagcgtagacgtaaagagtgaggagtattaagatttattgtaaaaagtaaaagaataaagtagtttttatagtgtggaagaggattcgagtatgttgtcgtcgttggtttgggtggtttgtttttatttttttattcggttttatttatattttgttgattgttttattttatagagagttgattggtttattttacggagagttgattggtttattttatagaaagttgattggttcgttttgatagagtgtttattggtgtgtttataattttttagttagatatagagtgttgattggtgagtttataattttttagttagatataaaagttttttaaatttttattagattagttagatatagagtggtgattggtgtatttataaatttttagttagatatagagtgttgattggtgcgtttataattttttatttagatatagagtgttgattggtgcgtttataattttttagttagatatagagtgttgattggtgtatttataattttttagttagatataaaagttttttaagtttttattcgatttagaagtttagttggttttattttttaatggtatttttgggattttgtcgcgtttagtggggtatttcggtagtttagagggcgttttttttttatttttttattaagtttagtaggcgacgttaattttgtttttagtgtagggtttgtttagttcgtatttattcggaatattattggttcgggagtattacgcgtagtttttgtttttattggcgtttttttttttatatttttttttaagtagagggagacggtttcggttttagttagttttagagaggggtttttatagtatagtagtgggttgaagggtttttcgagttcggttagagtagatatcgaggtcgaggaggcgttaagagtaagtaagggttgttagtaggttgttattttttaatgttattgtattttagtttgagtaatagagtagatttggtgttaaaaaataaaataaaaaataaagaaagagattaggtacggtggtttacgtttgtaattttagtattttgggaggttgaggtgggtagattacgagtttaggagtttgagattattttggttaatatggtaaaattttgtttttattaaaagtataaaaattagttgggtatggtggtgggtgtttgtatttttagttatttaggaggttgaggtaggagaattatttgtatttgggaggtagaggttgtagtgaatttagatcgcgttattgtattttagtttgggtaataagagtgtaatttcgttttaaaaaaataaataaagaaaaataaaatgaaatttttaattaaaaggagaaatttaattaggtgtagtggtttacgtttgtattttaatattttgggaggttaaggtgggtggatcgtttgaggttaggagttcgagattagtttgattaatatggtgaaattttatttttattaaaaatataaaaaattagttggatgtggtggtgtatatttgtagttttagttattcgggagtttgaggtaggagaattgtttaaatttggggcgtggaggtagtagtgagtcgagattacgttattgtattttagtttgggtgatagagcgagatttagttataaataaataaataaataaataggttaggtgcggtggtttacgtttgtaattttagtattttgggaggtcgaggtgggcggattatttgaggttaggagttcgagattagtttgtttaatatggtgaaattttatgtttattaaaaatatatatatagatataaaatagttaaaattagttaaaaaattataaataaataaaataaaaagataagttgtatatttaggaggttgaggtaggagattcgtttgaatttaggaggtggaggttgtagtgagtcgagattacgttattgtattttagtttgggcgataaagtaagattttgttttaaaaaaaaaaaaaaaaagataaatttagtagaagtattgtttgagtaatacggaaatttagaattaggaaattgaaggcggttattttatatatatttggggtaataagtgagttgttttagcgcggtttacgttgtgggcggaggcgggtaggaaatttatttataagtttgtgttaggaaataggaagaaggtgttttttgtgatataagatatagacgtagttttttatttaggaaatagggatagagtcgtagattagataaagatacgattaatattttttattaaatatttttaacggattatttatattttttttagaaaagtaaaatttaaatttgaatatatttgataattatggaatgtgagtatttacgtatgtttgtgatttggtttttttacgttttaggggtcgttttggttttaaagcgttttttgtcgtttttattttttttgtttttatcggaggggtagttatagttttcggttgagagaaattcggtcgttttgtttatttcgtgaatgattggttatagattttagagaggaaatagggatttattttttagttgttatgtaatttggggcggagttcggggtttatagtttttttgagggtaatttgagcgggagaagttgttgcgtttgattttaaatagtttttcgtacggaaaaggatttttaaaagtggggttatttttttatagtaatagcgtttttaaaataggggttttcggttgggcgcggtggtttatttttgtaattttagtatttgagaggttaagataggcggattatttgaggttgggagttcgagattagtttgaataatatggagaaattttttttttattaaaaatataaaattagttgggtgtggtggcgtatgtttgtaatataagttattcgggaggttgaggtaggagaatcgtttgaatttgggaggcggaagttgcggtgagtcgagatggcgttattgtattatagtttgggtagcggtaagagcgaaatttcgttttaaaaaaaaaaaaaaaaaaaaaaaaattatatatttatttattatttatttatttatttatttatttatttatttatttatttaggttgtcggtgaggacgtgaggtacgtgttattgagttattgagaatttatttttttgggtaagtttgtgaggttagggtttttagggaaaaaagttttttttagattttagggtttatatgtttgtagtgggttggtagggatcggggaagatgatgaggttgggataaggaagtggtattaatagaaagattaagtaaattaaattaaattaaatttttttttttttatttttgtttttttttttgtaattttatttgggtggttgaaggtagattttgattagagttatttttgtcggttttttttgttttgttttgtggggaaacgagtgaagaaaaaagtagaaggaaaggtaagtgaaatggagttttttgtgaagaattacgattagggttatatagagtaaaatttttagtttttttttgaggagtagtcgtatttttatttaaaaaagatttattttatgtaagatttagggttgggaattggttttttttgttttaagaattttaaagatttttagaggagagtgtttaaagatagataagaaagtggttagtgttttgaagaaagttagggggtttaggggagtgtgaattttgaatatttgagataggttttagttaatttagaaagtttatgttgttagggttgaggatgtgtgtcggtgatatagttttaggaagttttgatgatatgtgtttaagttgttagggtatagtttggttttatatattttagggagatatgagatattaattaatatatgtaagattaatattggttcggtttggaaaggcgggataatttgaagtaatggtgggataattttaagtggcgagggggtttttaggttataggtagataagagataaatggttatttttttttgagtttttttttttttgagatggaggttcgtttttgttgtataggttggagtgtagtggtgcgattttggtttgttgtaatttttattttttaggtttaagcgatttttattttttagtttttcgaatagttgggattataggtatgtgttattacgttgagttaatttttgtatttttagtagagacggggttttattatgttggttaggttggtttcgaatttttggtttcgggtgatttattcgtttcggttttttaaagtgttaggattataggtgtgagttattgtgttcggttttttttgagtttttgattagtttttttaaaggaggtaattagatagtatttattttagtaagtagaggagtgatcgaatagaatgagacgtaggtttgtttttagtagtttttaatttgatttttttttttagtttagtgattttcgggttttaagatttattttttttttataggtattttttgtttagtttagattgaatttgagggggtgtagggatgtattttaggttggagtgaagtggtatgatttcggtttattgtaacgtttgttttttaggtttaagagatttttttaatttagttttttgagtaattgggattttaggtgagtataattatgtttagttaatttttgtatttttagtagagacggggttttgttttgttttttaggttggtttggaatttttgaatttaggtgatttatttatttcggttttttaaagtgttgggaatataggcgttagttattgtgtttagttaaattttacgttttttaaaaaattaagagaagaaattagtaaaatatatttaaagtttttcgtatgaaatttatttagtgtttttgatgatttgtttttgtggattggatttataatttgatgtggtttttttgttttaatgtaattttattttttttttattttttgtattattattgttatatgtgtgtgagtgtatatatatatatatattatttttagatgttataaatttaatattgtaattttataattgttgttttatgtaattttttttaaaatagttaagaaatgaaaaggagttaggtatggcggtgtgtatttgtagttttagttatttaggaggaggttgaggtgaggggattatttgagtttaggatttgaggttgtagtgagcgatggttaaattattgtattttattttgggtgagagagtgagattttgttttttaaaaaagaaaaagaaaaaaaagagatttgtagtttttagtttttagtttttaaaaaataattattaatatattattttttttgatgttgtttgttttttttataaattttattttttttaatgtaatatttttgagatggagttttgttttgttgtttaggttggattatagtggtgtgattttggtttattgtagattttatttgttgggtttaagtgatttttgtgttttagttttttaagtagttgggattataggtgtgcgttattgtgtttagttataagttttatttttaattgatatataataattgttttttattggattgggattattatttggtgttatttttttttagtttgaagaatttattttagtattatattagtgttttttgtaagatatatttgtaagagataaatttttttagtttttgtttatttaagaatatgtttatgttggtttttttttttgttttttttagaataaattttggttttggagatagggtttcgttttgttgtttaggtcggagtgtagtggtatgattatgttttattgtaattttaatttttcgggtttaagagagttttttgttttagttttttgagtagttaggattataggtgtgtattattatatatggttaaattttttttttttttttttttgtagagatagggttttattttgttgtttaggttggttttgaatttttgggtttaagcgatttttttattttggttttttaaagtgttgggattatgggtgtaaattattgtttttgtatcggtttttagttttgaaggataattttttttgatgtaaaatttttgattgttagtttttttttattaatttttaaatttgtatatgttattgttttttttaattttttttttttttgagatagagttttgttttgttgtttaggttggagtgtagtggtataattttggtttattgtagttttcgtttttcgggtttaagtaatttttttgttttagtttttcgagtagttgggattataggtatgtattattatatttagttaatttttatatttttagtagagatggggttttattatgttggttaggttggttttgaatttttgatttcgtgatttgtttgttttagttttttaaagtgttgggattatagatatgagttacggtatttagtttatgttatagttttttaatttttattgttattgatgaggttagttattaagattattgtgtttgtgtgtatgagtgtatttgtatgagatgagtttttttttattgtttttaagatgttatttttatttttggttggtaatagttttagtataatatattaatgtttaggtgtgaattaattttttttttttttttgagatagagttttattttatttttagggttggagtatagtggtatgatattagtttattgtaatttttgatttcgtggtttaagtaatttttttgttttagtttttcgagtagttgggattataggtgtgtattattatgtttagttaatttttgtatttttattgagatagattttattatgttggttaggttggtttcgaatttttgattttaaatgatttatatattttagttttttaaagtgtagggattataggtatgagttatcgtgtttggtcgataatttttattgattgtttttttttgtaaatggattgtatttttttatttttttgtttttttgtaatttttttggaaaattgaaaattttagataatatatgttagttttggattttaattttttttttttgggggtgaaggtggttgttgttttgtttgtttttatagtgatttgtttgtattaattttgtggagttttttttttttgtagtatgagggtttagatatttttatagtgatttgtttgtattaatttagtggagttttttttttttgtagtatgtagtatgaggttttagatatttttgtttagatatttttgtttaggtttttttttgtttttgagatagagttttatttttgttgtttaggttagagtgtaacggcgtgatttcggtttattgtaatttttgttttttgggtttaagcgatttttttgttttagtttttcgtttttttttaatttttatgtttatttttaagtttgaatttttaggggttgtttttggattagtatagtttaatggttagttagtgatttgttagagtttgtgtttaaatgttttaagttagtaaggtttttaattttgttgttggagttgtgtgtgatttggagggtatttttaaagtttagagagtttataagtgagttatggttttttttttatttttgagattttatatttagttgtagggaggagtagttttttatagtttttttaagttttttttttaagtagttataattttgtgtgttgtatatagttttttaaattattaaagttaaatggtattttattaaggtattttttgtttgttttgtttttttgattttttttttaaatttttggttagtttgttattttgttgttttttttaattattgttatgacgtaggttagttatatcgttaggttttgttaatgaatttttttgtgaaaaagtattgttatatttttttatttatttatttaagaattttttttattaatatgggttaatggatatttattttattttatgggttataatttaattttattattatttattttgttgtttaaattgtttttattttaattattggaattatttttagttggtttttgtgtttttttgatatggtttttattttttaatcgagtatgtaaatattttttgatattataggatgttttagttttagaatcgatcgtttttttaaggagtcggaatgtcgttttgtttttaatttaaattttttttgtgtagagatagtgttttattatgttgtttaggttagtttcgaaattttggttttaagcgatttttttgttttagttttttaaagtgttagtattataggcgtgaattattatatttggtttgttagatttttttaatttttggtttttaattttttattattgaaaatttaaaatttataaaaaattagaaagaatagtaaagtgtttttattatttagttttaataattattttttttttagagaattttagtaatttgaataggaatgtggattagtaaggtttgtttaggtgattaaagtagtgaaaattatttttattaattgtgtgggatgaatttttaatagtaatatttatagtagagaaaagtaatagttttttttttgtttttagtattgaaggggattacgagtgtattttttggttgtggggtgtttagatattttataggaagttttaagaggtattagaatggattattggaaaaataaagttgtgaatatatttgtattttgggtttttagtggaagtttatattagttatagttatgataaaatttattttttgtatatttaagggttttttttggttataagagaatatttttaaggggaatttaaaaatataagaaattacgtttacgttgggtatagtggtttatgtttgtaattttagtattttgggaatttgaggtgggtagattatttgagtttaggagtttgagattagtttggttaatatggtgaaatttcgtttttattaaaaatataaataataataataataataataataaaaataaagtagggtatggtggcgtgtatttgtagttttagttattggggaggttgaagtgggtgggagaattgttttaattggggaggtagaggttgtagtgagttgagattgtgttattgtattttagtttgggtgatagagtgagagtttgtttaaaaaataaataaataaataaaaaattacgtttagtttgaggaatagtatttcgtggtatattgttataattagtttttaagagaagattgagtgttaggttttggagaggtttggagtattaattagggaattaaggttggggagggtgggggaaggtttagttagatttttcgtttttgatttttttttttatgatttaaagagatgtatttattattttttgttattatgtttgttaagtatttttaaatttattggtttttttttatttttttttttagttttaattttcgttatagtttattataattttttggttttttttttttgtggttataaaaatattttttagttgagatatatttttttgatttgagttttttttttttggtttatttggtgtttttattaattttatgtatagtgaggttttaagtttttataaagattattggtatatgagggggtttgtagtttattgttttatttatttagtttggtgttattttattatatttgtgatgttaggagttatattgtttggaaatgatgttgggaggttattttgggttgtttgaaaaataaatttattagaatttggggttttttttttttttagtgagtggggtttttaaaagttagaatttagtggaattaggggtgttttttttatttttggtagagggacgtgtgattagttatgggtttttaggtttttagtttttgggtagtttgtatttttgaatattttttgtatattagttattattatagtataaaaattgttttaaaataagtggtttaaaataatatatttttattattttataatatttgaaggatagtaatttaatatagtatagttgggttttttttttagggttttttaaggttgtaattatagttggggttttttttgaagatttaattaggaaaggatgagtttttaagtttattaatttagttgttggtaggaagtacgaagggtggtaggattgaaggtttggttttttttgaatgttgagttgagagtatttttagttttttattatatggatttttttaatatggtagtttgattatttgagttagtaaatgagtttgttagtaagataaaagttataaatttttattgtttatttatggatatgatagatttttatttttgttatattttattggttagaattaagtgataaggtttatattaaatttaaggtgggaaggattttataaagattcgaatattaagatgggggattattagagattattttagaagttaggttagtataatttgttaataattgatattttaattaagagtgttaggtgtttacgttgtttgtgtgtttttttattgataaggttgtttttatgtttgatttataatggagagtaataatatattgtcgtattttttttttttatttgtatgtttagtagtgtgtttggtttgtttttttatggaaaaataaaaggaattggatttatgttttttttttatttgttgatattgaattgaaaatttttttaaaagtttattttttaatttatagtatgcgatattttggtttttattttgagttttggtgaataataggtggtgattttaagggatttgttttgtatgatagttttatatttggttttttttttagtttttttttagttttttttttttgttttataagtttagttatatttcgaatattgttttttggttattttgtggattttgtttgtagtttgaggtataggttatttttgttttttgtttattatttgtttttgggattttagtttgagtggaagaggttttggagtgtggtttggatattattaattaggttttttttatattagtatatatatatatttatgtgtatataaatatataggtatattttttatatatatgtatgtgcgtgtatatatatatatatgtatgtcgatatatatatatattttgttgtggaatttggtgtttgtggttttatgtattttcgtaggaatttgtgtttaatggatatttcgagtagtttttattggttatttacgtttattgttatgttttatgaataaatttatgtatttttttttaaatagattgtatatttttttttttttttttttttttttttttttttttttgagacggagttttgttttgttgtttaggttggagtgtaatggggggattttggtttattataattttcgttttttggttttaagcgatttttttgttttatttttttaagtagttggaattattgacgttttttattacgttcggtaagttttgtatttttagtagagatagggttttattatgttggttaggttggttttaaatttttgattttaagtgatttatttgttttagttttttaaagtgttgggattataggtataagttatggcgtttggttatttttttttttttaagagatagggttttattttattttgttatttaggttagagtatagtggtatgattatagttttattttattaaaaatataaaaattaggtcgggcgtagtggtttatatttgtaattttagtattttgggaggtcgaggtgggtggattatttgaggtcgggagtttaagatcggattgattaatatggagaaattttgttttggtcgggtacggtggtttacgtttgtaattttagttttttgggaggttaaggtgggttgattatttgaggttaggagtttgagattagtttggttaatatggtgaaatttcgtttttattaaaaatataaaaattagttaggtatagtggtagacgtttgtaattttagttatttgggaggttgaggtagaagaattttttgaattcgggtgatggagtttgtagtgagttatttttacgagattgtgttattgtattttagtttgggcgatagagttagattttattttaaaaaaaaaaaaaaagaaaaaaagaaaattcgtttttattaaaaatataaaattagcgaggtgtggtggtatatttttgtaattttagttatttaggaggttgaggtaggaattgtttgaatttcggaggtggaggttgcggtgaattaagattgcgttattgtattttagtttgggtaataagaatgaaattttattttaaaataaaaataaaaataaaaatataaaaattagttaggcgtggtggtagatgtttgtaatttttgttatttaagaggttgaggtgggaggattgtttgaatttgggaggcggaggttgtagtgagtcgatatttcgttattgtattttagtttgggtgatagcgtaagattttgtttttaaaaagaaaagggaattttattttttgagggtttttgttattgtaatttttaaaagtgttttatttgatttttgaatttaattaatttaatgttaaaagttatagtatagtagttaatgtttatatagttttttatggtattgttttatatattggtatttagttagtgtgtattagtatagttaatattgattgttatagaaaatagaatggttatcgtgataggtggtaaaattaataagtattagaaattttaatattttattaattaattaattatttgttttagtttattatagtgattattaatggatgggttttttgtattgtagtatttgagaattatttatggtattatcggttggtttagttatgttattattgtatatttattgttttgtggtttaggaaaattattagttaattgttatttttatatgttgtaatttataaatagtatatttgtttggtttttttttgtttttattgttattgtgttattatttatttggaaataataattgtgtagtgttttgatatttataaatttaagaatttagaatagtaaatagtaagagtgaagtgataaagtttaaatatattttatttatttatttatttatttattttttgagataagagttttattttgttgtttaggttggagtgtagtggtgtgatttcggtttattgtaatttttgttttttaggtttaagcgatttttttgttttagttttttgagtagttgggattataggtgtgtgttattatatttattaaatttttatatttttgttttattttattttttttgagatagaagggtttttgttttttttttttttgagatagaagggtttttttttttttttttttgagatagagttttatttttgttgtttaggttggagtgtaatggcgaaattttagtttattgtaatttttgtttttcgggtttaagtaatttttttgttttagttttttaagtagttgggattataggtatgtattattatgtttggttaattttttgtattttagtggagacggagttttacgatgttggttaggttggttttgaatttttgattttaggtgagttatttgttttggttttttaaagtgttgggattataggtatgagttatcgcgtttagtcgatttttgtatttttagtagagatggggtttcgttatgttggttaagttggttttaaatttttgattttaggtgatttattagttttagttttttaaagtgttgggattataggtataagttatagtgttaggtttatatatattttaaatattgtttttagatattgtaaatatgatttttttgaatttgagataaattatgaaattaatggtattaatattgaattatagtttggaataattgatatgtaaagattatggtaggtgggaatgtttttagtattgtataagatttagtttaaaggaaataataatttatatttttaaaatttaattaaaaatttgataattggttaggtgtattggtttatgtttgtaattttagtattttgggagtttaaggtgagtgaattatttgaggttgggagttcgagattagtttgattaatatggagaaattttgtttttattaaaaatataaaattagttaggtgtggtggtgtatgtttgtaattttagttattggggaggttgaggtaggataattatttgaatttaggaggtggaggttgtagtgagttgagatggcgttattgtattttagtttgggtaataagagtaaaattttatgttaaaaaataaataaataaaaaatttttgataattttgataaaatttataggtagttgattattgtttgaaatgtaaatattaaatgaaaacgatatgtaaagtatatattttgtggatgtgtgaaaaggtgaatgttttagtatattgtcggtgtttagaatttagggaaaaattagtaataagaagaatttgaagaatattatgaatgagttttatataatgaagtttttgaaataataaattttttgaaatattttgtattataaaaagaataaaatattgaaaaagtattattagaatgttaatattatttattgtgtaattagtttattgttaaatagagttttaaaaaaggttgtaaatagtgtatattattgtagtttatattaatggttataatggttataaaacgtatatttattatgatgagataattttttagtaaatttataaatttaggtaattaattattattaagaaagttttaattatgtaataaaaaaaaattttttttttttgagacggagttttattttgttatttaggttggagtgtagtggcgcgatttcggtttattgtaagttttattttttaggtttatattatttttttgttttagtttttcgagtagttgggattataggcgtttgttattatgttcggttaattttttgtatttttagtagagacggggttttattgtgttagttaggatggttttgattttttgatttcgtgattcgtatattttggttttttaaagtgttgggattataggtgtgagttattacgttcggttataaaaacgtgtttttattagtgatttaaatattaaattttagatttataaaattgatgatataaaattaatgatttttgtttatttgaggaattgaaatgatgtattaagtttatttatttattagtgtttaagaaaagtggttttgatgtgaaatggttatataatgttatagatggttttagtatatgttatagagaaagtttagagaagttaaagttttagagaagtttttatatggttaggtataatggtttatgtttgtaattttagtattttgggaggttaaggtaggtagattacgaggttaagagattgagattattttggttaatatggtgaaattttgtttttataaaaaatataaaaattagttgggtgtggtggtatgtatttatagttttagttgtttgggaggttgaggtaggagaatcgtttgaatttgggaggtagagtttgtagtgagtagagattatgttattgtattttagtttggtgatagagcgataatttgttttaaaaaaaaaaaaaaaaaagtttttttatattttaaattggtattatataagttattgtatttagtgatgttaggatgatgtagtaaaatgtttaaatgaaaaattattttaaatatttgttttattaaattttatatttataattatatatgaaataagtatttgggaaaattaaaaatatttttaaagatattggaattgaagttatgaaattagaaagtatatttgggtattttgtaatagtgggatgttaagagtattagggaattgtattaaattttttatatttattttaatagaagttgtgaaatgggagtagtaagtgtttaggatataaatttttttttttagaaatttgacgttaataatttatatattaatagagatgttaatgttatttttattttttttagaggaaatattaaaaattatagaagttggattaattgtagaaaaataagaattagttaatatataaaattaaatatataaagtaaaggggaaaaagtagatagtattgtttaaaaatatgatatattatttgaaagaaaaatgttaattttaagagaaaaagttaattagattatttaataatttatgtgattgtaattgtagtttgatgataaaagtaaaatatattaagaatttaaaatttttaaattaagttaattatgaaggatgtttataaagttttatagatgtaatttattaaattaagataatttttaatttaattaatataattaagtttatttattaaagatggtttttattaattgatttttgtggtggagtgaacggagatattaaataataagaatttttaggtcgggcgcggtggtttatgtttgtaattttagtattttgggaggtcgaggcgggtagattataaggttaggagatcgagattattttggttaatatggtgaaatttcgtttttattaaaaatataaaaaatgagttaggtatggtggtaggcgtttgtagttttagttatttaggaggttgaggtaggagaatggcgtgaattcgggaggaggagtttgtagtgagttgagatcgcgttatcgtattttagtttgggcgataggagatttcgttttaaaaaaaaaaaaagaatttttaggttaggcgtggtggtttatgtttgtaattttagtattttgggaggtcgaggtaggtggattatttgaggttaggagtttgagattagtttggtttacgtggtgaaattttttttttattaaaaatataaaaagtagttgggcgtggtggtatgtgtttgtaattttagttattcgggaggttgaggtaggagaattgtttgaatcggggaggtggaggttgtagtgagttaagatcgtattattgtattttagtttgggcgatagagtgagattgttttaaaaaaagaaaaaaaaaaaagaaagaaaaagaattttagatagtagtttaagggttaaaaaatttttaatatagttgttaaagtgagagaggatttggtattatgaataatatagttgattatatacgttataatatataaataatttaatggggaaattattagaagtttatataaggtttttttgttaaattatggttaatataggtatatattatttaattaataattattatttaagaaatgtaaaaaatgtttaaaaattaataaataatttggaaattgttataattatttaagaaattatttatattttaattgtgttatttggtaagtagttttataattatttagttaggatagaaaaatagtataattgggaaaattttatttatatattaatttttattattatattagttgttaattattttgaatagtatttttgattttatatatagtttgtttgtagtaagtattgattgaatggtgtttgatataaatgaatgaagatgatagttaggatatttaggataagtgaaagtagggttgaaggaatgtaagggttgtagtatttattgttttttagttgaaatatttagaaatagaaagggtaagcgtatagaggaatagtatagtagaaattatgtgatttttttatgttaatttttttttttgtttagattttatttgtttatatgggtatttttatatagagataagatttagaaggttggatagttatatttttttgtttttgtttttaggaagttaagttttttgttcgttttggttgttattattaattcggcggttgggttgtttatgtgtagatagatgttttgaaaatattaagttttttaagtagtttgaattgtagggaggtttagagagggtagattttttgagttgttgatttattgcgggattgatttagtaagattttaggtattaggtagagttagttaggaaaggaaacgttttttgtttgtttttgtggggaaaaagaatttattttttggatagagttatttggttttaatattagaaaggaaagcgaggcggtgtattttttagaatagtagtaggtagggttacggagtattttatagttattagtggggttgttttgttgtttttgtagtagtgttttgttttttagaatttttttttggtgttatttttattttgtttgaaagtagtgaggaggatgatggggagagagttagataggttggggttgggaagagtgagtgtttttgattttttttttatttaaatttaatttttattttagttttttttttaattttttaaagtaagtatcgttatttttaattttttatatggaattatttaggggtggtaaaaattttatgggattggtggggttttttgtgtttttaattgaaatggtttttttgtgggtttttaaagttaaattgtttttgtttatattggaaggaaataaagaaaaataagtatgattattgtattaagtagtgggattataggtgaggttttttttgtttattagaaaatttttggttaggcgcggtggtttatgattgtaattttagtattttgggagtcggaggtgggtagattatgaggataggagattgagattattttggttaatacggtgaaattttgtttttattaaaaatataaaaaattttttgggcgtggtggtatgtatttgtaattttagttatttaggaggttgaggtaggagaatggtatgaatttaggaggtagagtttgtagtgagtagaggttgtgttattgtattttagtttgggcgatagtgcgagattgtgttttaaaaaaaagaaaagtaagaaaattttttttttgtttttatagatgtgtaataaaaataattgggagaagaaagaagagttgatttggatttttataatgtaaagaaaatggtatttaaatttttattataaggatttatatgtattatttaatttaatttatttagaatttcgtgtagttagttagataattgttattttagtttaattgatagatgttaggaatgagatttgaaagtgtttagttaggttgggtgcgttggtttacgtttgtaattttagtattttgggaggttaaggtgtgtggattatttgaggtcgggagttcgagattagtttgattaatatggagaaatttcgtttttattaaaggtataaaattagttagggcgtgatggtatatgtttgtaattttagttatttcgtaggttgaggtaggagaatcgtttgaatttaggaggcggaggttgtagtgagttaagattatgttattgtattttagtttgggaaataagagcgaaattttgttttaaaaaaaaaaaaaaaaaaaaaaaaagtgtttaattaggattttatattaagtttgtggtggagtgttaagagttaagatgttttttgtagaaagaattatttggtttttttttttgtttttttttgtttttgtattttttggtggagatggggttttttcgtgttggtagggttggtttttagtttttgatcgcgagtgatttgtttatttcggtttttcgaggtgtcgggattgtagacggagtttcgtttatttagtgtttaattttgtttaggttggagtgtagtggcgtgatttcggttcgttatagtttttattttttagtcgtttgttttggttttttaaagtgtcgagattgtagtttttgttcggttattattttatttaggaagtgaggagcgtttttgttcggtcgtttatcgtttgagatgtggggagcgtttttgtttcgtcgtttcgtttgggatgtgcggagcgtttttgttcggcggcgatttcgtttgggaattgaggagtgtttgtgttcgatcgttatttcgtttgggaggtgaggggcgtttttgtcgggtcgttttgtttgagaagtgaggagttttttcgttcggtagtcgtttcgtttgggaagtgaggagcgtttttgttcggtagtcgtttcgtttaggaggtggggggtagttttcgttttgttagtcgtttcgttcgggaggtggggggcgtttttgttcggttagtttgggaagtgaggagtttttttgttcggtcgttatttcgtttgggaggtgtatttaatagtttattgagaacgggttatgatgacgatggcggttttgtcgaatagaaaagggggaaatgtggggaaaagaaagagagattagattgttattgtgtttgtgtggaaagaggtggatatgggagattttattttgttttgtattgggagaggtttttttgttttgggatgttgttgatttatagttttatttttaatttcgtgttttttgaaatatgtgttgtgtttatttagggttaaatggattaagggcggtgtaagatgtgttttgttaaatagatgtttgaaggtagtatttttattaagagttattatcgttttttaattttaagtatttagggatataaatattgtagaaggtcgtagggttttttgtttaggaaaattagagatttttgtttatatgtttatttgttgattttttttttattattgttttatgattttgttaaattttttttttcgagaaatatttaagaatgattaataaatattaaaaaaaaaaaaaaaaaaagaattacgtgtattggttgaaatagtattaataaataatttaggttttgagttggatatagtttggtaaatatatgttttataatgttttatagttttttagtgttttatgggatatttgtttttttatagaaagtataggtagaggttttttatatattttgtagggacgttgatttgtatggggagggttggtatatagtttttgttgggtatgaatagtataaatttttggaggttgtgttttgtttaggatttggagttggttggggatttttaatgttttgtgttgacggttggtttgggggtttttttttattagggtttttttttagttttttaaggtgggtatagttttttttggatatataggtaatgggttggataagtattttttttttttaaggtttagttattaggtattttttttaggggatcgggtttggaaatttttattatatataatagtttttttgttgttttatattttttaattttggcgtggtggtttttagtttttttattattgaggaagtataggtgattttttttttttttttgttttaaaatggttttaattattaaataaaattttttaagtgattatttgttttttttttttttttttttttttttttttttttttttttttttttttttttttttttttttttttttttttttttttttttttttttttttttttttttttttttttttttttttttttttttttttttttttcgaagcgtagtttcgttttttttgtttaggttggagtgtaatggtgtgattttggtttattgtataattttagttttttgggtttaagcgatttttttgttttagttttttgagtagttaggattataggtatgcgttattacgtttagttaattttttatttttagtagagatagggttttttcgtgttggttaggttggttttgaatttttaattttaggtgattaattcgttttagttttttaaagtgttgggattataggcgtgagttatcgcgtttaggttttatttgtttttttatattgtttattaagatatatttaaggttattatgaagataaggttatattatttataatatatggaagtaagttttagttttcgttaagattttagtttgggttagttggttgagaggggttgttaaaattttagtaataggaatagttgtttttttgttattttgttgttatggtagatgttttttttttttaggattattgatttttggagatttatgatttataattttgtggttagaaatgagatgttaaaagaggataagattattcgggttttttttttttttgggtttttttttttgggttaattaagaataggtatatggagaaaagaatttagaattattttataattatataaagatttgtttatatataatggtttaaggaggtagggtttgtttatgagttattattatttatataatgtagtttaattattttgttttgtttttagttatttaagattttttcgattatggggaagttttatggtatgggttgtttttttaatagtattttgattgaattattgagtgttatgttagaggagtgggatttggttgattttttttttttggtgtttaggtgtttaggaatttttatgtggtagtgggatttagatttaagaaagtatagtttttgtgtggttttatggggagtatatgttttattgggttggttttaaattgttttagggttaagttaggaggtataaagaatttgtttttttattttttaatatttttttttggtaataatttaattttttgattaaaatatttatagtggtgttttatattttttaaagtataatttaaatatttttttttttagaaaaatttaagttttttaaaataggggtttttaagttttgggttatggattggtatcggtttatggtttgttaggaattgggttgtatagtaggaggtgagtggtaggtgattaagtattagcgtttgagttttgttttttgttagattagtagtggggttagatttttataggagtgtgaattttattgtgaattgtgtatgcgagggatttaggttgttcgtttttatgagaatttaatgtttgatgatttgttagtgttttttattatttttagatgggattgtttagttgtaggaaaataagtttagggtttttattgattttatattatggtgagttgtataattattttattatgtattataatgtaataatagaaataaagtttataatataggtaacgcgtttgaattattttaaaattattttttcgaaaaattgttttttatgaaatcggtttttgatgttaaaaatgttgggaattattgttttagaaaatatagttttttttttgatttttggtattttgtacgttttttttagcgttaattataatagttatttttaagtttgtttatttattgttattaaattttagatttttttagcgtaggaatttttttcgttttttagttttattttggattttataatattttttgaatataggaagggttcgataaatatttgttaaagattttttggagtttggtttaaaaagatttaagatttaaaattgaggaaggtagatttttgaggtgaggtaaatatagtttgtcgatatggtaggaagtagaaatgggtagattaagtagagaaggaaaatagtttatttttttgggatattaataaggagtagtatataggagtgggataaaaagtaggatataggagtttaaatttttattaaatttatagattgattttttttgtattaattaagatttttggtggaacgtggtggtttatgtttataattttagtattttgggaggttaaggtgggtggattatttgagattaggagttcgagattagttggttaatatgatgaaattttgtttttattaaaaatataaaaattagttgggcgtggtagtaggcgtttgtaattttagttatttgggaggttgaagtaggagaattatttaaatttgggaggttaagtttgtagtgagttaaggttatgttattgtattttagtttgggtgataagagtgaaatttagttttaaaaaaaaaaaaaaaaaaaaagatttatttgttgttgttaaaatgtaaagattttgggtttatgaagaaattaatattttagtaggaatgtttgaaataaaaatatttattattaattgaaatttaagtattaggttgtttattttgtgttgttgtaatataatacgtagattgagtaatttataaagtaaagtagtttattttatggttttggaggataagaagtttaatattaagatttcggtatttggtgagtttttttgttgtattattttttggtaaaggtaagtgggtgagtgagggtaagaggttgaatttgttttaattttaagtttttttataattagtattaatttatttataaagttggaatttttatggttagttagttattaggatttatttttcgatatggttgtattgtggatttagtttttaatatacgttttttggaggatatatttaaattatagtataggtattttatattagttttataatgatttttttaagaaaatagtgttacgtataagatgaggaattggagtttagataggtgaagttttatcgcgtgttatataggaagaaatggtaaagtaaaaatttatatttaggattttttgggtttttttatcgtatatgttgtttttttattggatattatttgatagaatgagatttaggtgattatagggatttattaggaaaacgggaaagtcggtatgattagaattagaatacgggttagtgaatgtagttttgggtggattatggtattggaagttaaaggatagtttgaatgtggttaaaaaattaaaataataaggtataaaacgtataaatgaaatataaatgatgtttaaatatagtttttattttattttaaagtttattttagattagtttgggaaggtgaggggaatgaagtagatgttgttaaagggttatgggagagaaaaggtatttgtgggaagagaataattttttttgatttcgtgtgttgttttacggatatattggagtagggattgggtttttaaggttttaggtagtttcgtgtttgtggttttgttgggtgtagtttacgtggttgttcgaatgggttgtaggttggtgtttaaagtttttttaagggggcgttgtatgttgttattgattttatagttttggggttttggtggtggttaggttttgtttttagcgttttataaggtatttttttttgtggtttggatttattagatattagatatttttttggtgggggttttttgtggtagttgtattttatatttttatttagtattattttagtggaggttttttgtgggttgggtatgttagtttagttttttttttttttttttataaagttattagttttatttttgtgataatttattaatttattaatttatgaatgaaggtatagttttacgatttaattatattttaaaggttttattttttagtattgttatattagggattaagttttaatatgagtgttggagggaatatttaaattatagtagtatgaaaataatatttaattttaaggtatatggttaagattataggtggtaaggaataggttagagaataggaataggttaaatttgttagagatgtgttgtggaattatttgtatttttagttatgattttagtttttttaagtttattttattgtaagaatatgaaaaattaaattgagatttaggttttttttttattttttaatttttattttttgagatggcgttttattttgttatttaggttggagtgtagtcgtataattttggtttattgtaattttcgtttttcgggttgacgttatttttttgttttcgttttttgagtagttgggattataggttcgtgtttttgcgtttagttaattttttgtattttttagtagagacggggttttatcgtgttagttaggatggtttcgattttttgatttcgtgatttgtttttttcggtttttttaagtgttgggattataggtatgagttgtcgtattttgtttaggtttttatttttaatagaaaagagaatagggaaggaatataggttagtgtgaggaagggggttatggtagatatagaggtggattgtttttttatttttttatattgtgttaatagggatatagatagatttagaggtttttgtaaaaagagaagttagagttttttaagatatataggggaggcgtgaggaaattttgtattttagtcgtatataaggtagttgtgtattttagtcgtatataaggtagttgttttaggttatagaagaaaatagttatgaataaatttaggttagttacggtaagtgatgatattttgaatagtttattatatatttaaaaattttgaattaaaaaatttttataatttagttttgttttttttgttttattttttatttattttagatttttagaattttatttttataagttgtgagatttagatttttgggtattgtcgttttttggggtagaataaaaataagatttggttagagtttataggagatgtggtgtaggaggaattatagggtgggcgagtttttttacgttttcgtttcgtatttatatttagttttagagtagttttttttttttttatttgttggaagaaaatgttttgtgaggggttagggaggaggtagggttataaggttttagaggaattttttagttttggattttagagaagttttttgaattgtgattgtagatttagggtaggattaggaaacgtgaagaaagtaggtgtgggttttggattaattgtttttttgaggtttgtttttagtagggatttttttttgtgatttgtgattgttgggattaggtttttattattataatcgttaaggtgataaatttgttttttattgttataggtgttttataaaagagtaggtgcggttgggtgcggtggtttacgattgtaattttagtattttgggaggtcgaggtaggtagattataaagttaggagttcgagattagtttggttaatatagtgaaattttatttttattaaaaatataaaaaaaaaaattagttaggtgtggtggtacgtatgtgtagttttagttattagggaggttgaggtaggagaattgtttgaatttgggaggcggaggttgtagtgagttgaaattacgttattgtattttagtttgggtgatagagttaagatttcgttttaaaaaaaaagagtaggtgttggtatatagggttttaggttgggtaggttcgtgtgtgtggatggtgttttttagtaacgaggtaggatatatttttatttagggtttgaaatatttagtgggataagaaaatttagattttattttttttttttttttatttgagtttttttttttttatattatagtagtaattatagttttagagattatagatttaaggagaattaggttagtaatgatgtttacgatggggatggtgggttgggaagtcggttttgggaaaagaggggaacgtaaggggttttgatttttaggttttagttttgattttgcggaagggttttagaagggttttcgttttttttgagaagagatatgattttttatttttttttttattttattttagggtgacgggttcgggtagttttttatgttgtatatggtacgtgtatttttgtttttttttagaaggtattattatagttgtttatttttggaaggttttattttttgtaggtttggtttttacgagtttcgtgttttgggtatggttttttttattttgttgttaggttagtgtgattttcgtagggtagaagtttagggtttagtattttagggtggttttatggttagagatggggtggtgagttacgtgtgtttttgggggttttgaggggaagagttagaaaatttaggtattttgtattttttatgggatattttagtagtatttatgtgattattttgagaaggaagaggataattatagtaggagaagaggataaaattttgatattagtttggatttagggatttgggatagttttttattttttggaaagttttagaatcgggatgagttagtttagggtagaaggtgaaaagggatttttggttttggtttgtgtggatgttgagtgattgagaaaagttggagttagatttttaaaaatttttggtgtggggttgagaattaggtacgagagaaattttttcgtgatttttaatattgggagttaaagagaattgtttattagtttatttgaaggatggaatttttagcgagattagattttttaattgtttttgagagaggtttggttttttaagagagttattttgtggtataggattttttgtattttaggtgatagtttttttttttgatttaagggaggagtggtattttggtttttatttttgttttttttattgtttgaggtttgttagttgtgggtatagttttagtttaagaaggagatgggagagtagttttgtggatttttttatttaggtgaagtagcgtttttttttttttttttaggtatttgtggagttattttacgtatgtgttttttaggtaggttttttggtgtttcgttttagaggtattatttgatttttgttcggagatttgagtcgtcgtgtttatcgcggtttaggagcgtaggtttttatttagggtgagataatttttgtcgtcgtaggcgaattgtttatattcgcggaggaagcgtttgtcgggttttagttcgtagttatgtatttattgtagggtgtgagattttggtttcgttttttagttagtttcgtttattaagtttcgttttcgtcgttattattttgtgggtattttggtttaaattgaaaaagaatcgggtaaaggcgtttgagatttttttcggtttagggtttgggcgggtttcgtagttttggggtgaatttgggattcgaagattcgaggggattcgcgtcgttcgtgggggatggggaggggtcgtgatttgtttttttggtcggggttatttatcggtttcgttttgattgtagtagtcgcgtagcgttcgtaggtttattcggaaaatttgtgcggtgtttttggcgtttcgtgtttttcggttttaatattttgattttttttgttttatttacggcgttcgcggtattattttcggattcgcggcgtcgttgtcgaagcgtacgaattgggtgtcgtttacgtagtttatagagatgaagcggggtttttcgcggtcgggtcgggatacggaagtgtggaaatattttaaggagtgggagtttgggggcgaggaggggttgagatcggttcgatttttttttcggcgcggtttttcgagtttttcgttttcgtcgggtcggtttttttttattttcggtagaggtcgtttttatttcgatttcgtatttattcgtttaggtttgggtaagggttagggttttcgagaggagtaaaaggagggttttatttattatgattttagtttttgagttttgagaattttttgagttcggatggggattttatagtcgggagtcgtggcgacgttgattggtttttttagaaattcgatatttattgggaatgagaattgagtttgcgttatgagtatttaggaagaaggatatatgattaggttacgagaggaacgggaaattgtagagttttttagtaattagtagtttttaaatttttaggtttcggtatttttgtatatttttagaaattagttttggttgggcgcggtggtttacgtttgtaattttagtattttgggaggttaaggcgggttgattatttgaggttgggagttcgagattagttcgattaatatggagaaattttgtttttattaaaagtttaaaaaattagtcggcgtggtggcgtatggttgtaattttggttatttgggaggttgaggtaggagaattatttgaatttaggaggaggaggttgcggtgagttaagatcgtgttattgttttttagtttgggtaataagaaaaaagaaattagtgaggatttaaataaattttgtttttgtggattgtattaatttttattatatataaattaaaagatattaaaataaaatattaaaaatattaatttatttaagagaatattaataatttattatatgttaatagaaataattttttttttttttgagttagagttttgttttgtttttaggttggagtgtagtggtatgatttcggtttattgtaatttttttttttcgggtttaagcgatttttttgttttagtttttttagtaattggaattataggcgtgtgttattatatttagttaatttttgtgtttttagtagagacggggttttattatgttggttaggatggttttgattttttgatcggaaataatatatttttaatgaaaaaaaatttaatttttaatttttttaaaataaataacgtataggtcgggaacggtggtttacgtttgtaatcgtagtattttggtaggtcgaggtaggtagattacgaggttaggagtttaagattaatttggttaatatgatgaaattttgtttttattaataatataaaaattagtcgggtgtggtggtgcgcgtttgtaattttagtaattttggaggttgagataggagaattgtttgaattcgagaggtggtggttgtagtgagtcgagattatattattgtattttagtttgggcgatagagtgagatgtttagggggaaaaaataagaaataaaaaataaaaataaaaataaaaaaataggatttgttttaagaagttgtttttgtagttaaattagttgagattcgttataattaagagagtcggttaaatgattttaaaaagattttatgttttattgtaatttcgtttttaggttaaattgcgtttttatttatgttatgatagttgacgatttttatgacgatgagtagaagaagttttaaaaggattaaaaggaaagcggtattattagtttggagaagtttattgtttgtttttataaaatatatgaatattttttttttttatttttaatgtttaatttttttattagagtaattttatattttagtttttttattttttattagtcgttttattagtggagaagttgatttggtagagttgtttttttttttataagttttgtgtaggaaataaagtttgttttgtttaaggtttatttttggttttatgtattggttttgcgatttttagtgaggaaagattttattttttgtagttattaagatttttggtaataagaagagtgattattttttatttttataagtgttgtttttgtaaaattttgtaagtattatttttggtttatagtatatatttttttatgtatttatttttaaatttttaatttttattttagatatagggggtggttaggcgcggtggtttacgtttgtaattttagtcgggagttcgagattagttttattaatatggagaaattttatgtttattaaaaatataaaattagttggaggtggtggcgtatatttgtaattttatttatttaggaggttgaggtaggagaatcgtttgaattcgggaggtagaggttgcgatgagtcgagattacgttattgcgttttagtttgagtaataagagtgaaattgttttaaaaaaaaaaaaaaaaaattagaaaaaaatagatataggggttatatgtgtcggtttgttatatgggtatgttgtttgatgttgaggtttggggtatggattttgttatttaggtagtgaatatagtatttataggtagttttttaatttacgtttttattttttttattttagtcgtttatagtgtttgttatatatatgtttatgtttatgtgtgtttagtgtttagtttttaattataagtgagaagatgtagtatttggttttttgtttttgtattaatttatttaggattatggtttttagttgtattttagttatttttttattttgattgaagtgtatatgttaaaaaatttagttttatataaatattgagttgaaaaaggaaggattttttgtttttagatatttgaaatataattttattttgattttaaacgaaaaggaatgggaatgatagtaataaataagattttatcgttgaatattgtgatgtgattgtagtagtttatatttgaaatttaaggaattaattgtgttttaaaatagttaaatatgtaggtttaaataatgaaggtattttttgaattgttatatttattgcgaagtttatttattttttttagtattttatagatgaagtatatgtttcgtttagttagataataatgaggtggtatatacgttgtataattgatattataggatagttgtttataaaattagatttttgacgttgggttttagttttatttttataggttattattttcgttcgggagagtagttgtttgagtaatttttaagtcgtgtttatattgtgttgttaaagttgggtttatgataatttttggtggggcgagagtaggtatggtaataaattttaagttagggtttttaatgagttttttagtaagttagaggaagggttttttaaagttatagttatttttggtagaaatgtcgtagtattgaagatttttttttcggtggaagataatggatttcgtttttatttttttgtttttaatatttattttgttgttatttaatatagtgggggtgtttttatatatttatattagatttttatgttagttaggtatatttttgtaagtaattttcgatgttatattaaatattatgatggtattttgggtttggatataatagttattttttagtttattgaatttttttaggtcggttgtgttttatatattgaatttaataggttttttgttggtatggaatattaggggatgaattttaatatttaaggtggttatatatttttttttaaatttattagttaaatgatgttttacgaaagtcgtttttttagtattattattattaattaatataagtttgaattggatttggggttgtttttgcgtagttattgcggtgttttttttagaagcgtttttatgttcgtttgatttaggaaggaaggattattattgttgttgtttagagatagggtttcgttttgttatttaggttggagtgtagtggtattataatagtttattgtagtttagaatttttgggtttaagggatttttttattttagtttttttagtagttggaataatatgtgtgagttattatgttcggattgggaggattatttttaatagttttttatgtaattgtggatatttatattttatattatataaaaattgtgtaagtggtgatttttttttttttgaaagtaaataatttatttttaatttttttaaattttatttatttaaaatatttttaaattttaatagttttgggggaataggtggtgtttgtttatatggataagttttttagtggtgatttttaagattttggcgtatttagtatttgattagtgtatattgtatataatgtgtagttttgtattttttagtttttttttatttttttttcgttagtttttaaagtttattgtattatttttaagtttttgtgtttttatagtttagtttttatttataagtgagaatatataatgtttggttttttatttcggagttaatttatttagaataatggtttttagttttatttaggttgttttgaatgttattattttttttttttttatgattgtgtagtattttattatatatttatatatttatatatagatatagatatatatagatatagatatatataaaattatattttttttatttatttattgattgatgggtatttgggttggttttatatttttgtaattattaattgtgttgttattaatatgtttgtttaagtattttttttttttttttttttttttttttttttttttttttttttttgagacggagtttcgttttgttatttaggttggagtgtagtggcgtgatttcggtttattgttatttttattttttggttgacgttatttttttgttttagttttttgagtagttgggattataggtatttgttattacgttcggttaattttttgtatttttagtaaagacggggttttatcgtgttagttaggatggtttcgattttttgatttcgtgatttgtttgttttagttttttaaagtgttgggattataggcgtgagttatggtgttcggttattaaggggataagttttaatagtttaggtttaagggtagtggaagttgaggaattggagggaaaggtaatttagttaaaggtggatatagaagaatagaggaaagagaataggaaattttttttttggagaggaaagaatttggggttttaaagttttgttgtttttttttaattgtttgttggttttagttaattttgtgatagaattttagagggaggtaatgtttgaatttcgaatgtattatgaaattttgaagtattaagtaaattaagttttttatttatattgtttaattttaggattatggttttttagttttgttttaaggaagataagtttggggaatttaaaaggttttaaggatggttattgaagatttaaattaattttggcgtattttatttattgattttaaaacgtatataggagaggattttaatttttttttttttttttatttattttaatttttaaaaatagagatgagtttttgttatgttgtttaggatggttttaaatttatgagtttaagtgatttttttattttggttttttaaggtgttgggattataggtatgagttatcgattataaattttgattatatagttgataggagttttagaagacggtttatattggatgttttggaattttggtattttgttttgttttttattaatttttcgatagtaaaagaaaaattttataatttttgtgaggaaatggtagaggttggagcgatttgttttttaatagtgtgtttagtataggatttttgtttttatttagtgggtagtttgtgatttaattgtttattttgtgattattttttttagattttttttgagattggtgcgatttttaatggtaattttgtttatttatgtattagtttattttgataatagataatttttttttggggagattgaagttttttattgaatggcgataatagtttaaatagtttttaaagggtcgatatatatttatttttttagaaagtaaattttgtttttaaaagatgtttagaaatagaggtaagaaattaagtaatgaatttagtataagttttttttaaaggtaatttttttttaggattatttttgatattagattttttaatttaaaaaaaaaaagatattaaagaaatgtttaaatatgttgagtttatttgggaattagaatgaggattgtaatttggggtgtattggtggattgttattttgggaaatattagtttagttagatgtagtgggttgaatggttgtttttataaagatatgtttttgttttagtttttagaagttgtgaattttaagttgtttggaaaaaaagggtttttgtagatgtaattaagttgaggatattgaaatgaggagatttttttggatgatttaggtgggttttaaatttaatgaaaagtgtttttttaataggtatatagaagagagagttagaagaggagaaggtaatgtgaagaaggaggtagagattggagtaatggggttataagttaaagaacgttgattaatgttttgggtttttagaattgtgaaagaataattttttgttgttgtaagttgttaattttgagggtatttttgtggtagttataggaagtaaaaatatggatggttaattttaatattaatagtggtatattaaattgatataattttgataatgtgtttggagaatagtattttattttatttaaatatttataattatagtttaattatgatttatattttaattaaatttagtttgagggatattttataatatatttggttagtatttttcgatattgtgaaaggtattaaaaattaggaaaattttaggaattgttatagattagaggatgtcgtggaggtacgatagagattaaatgtagtgtgatattttttatggaattttgaaatatagaaaggatattaggggaacgttaatgaattttaaataaagtttgtagtttagtaataataaggtatgaaaatggttttattagttgtgataaatggattatagtaatgagagatgttaatattaggggaaattgattgtggagcggatggtaattttgtattattattgtaatttttatgtaaatttaaaatttttttaaaataaaattatttaaaagtagtagttaggaaaggattaaggagtggaagaaaaaaatgattaattttttatttttttggagtgttgttatgaaaaggttggagggagggtttgtaaggaggagttggaaattttagagataggtagttttagagtttttttttgtttcgtagagtcggaatttcgcgtagtttagggttttttagaaggtttttttattttttggataattttagttttattttattgatatattttttttggattaataatttgtgttttatttagattatcgtttcgttttttttagagtagtttattagaatttaagcgtagagcggtagcggtttcgtgtggtcgaaggattgaggagagatatttagtttttttgttttttttttatttgggatttttttaggttttttttcggatttcggtagaatagggttttgtgtatatgcgggcgatttcgtttcgcgataggtgtttttttttagttagtggtagtggattttgattttaaggtagagggaggtttgtaggttttaagatttggtttttaggtttgggtggattttatagatatattgtgtttttagtacgtagttttttagtgtttttggaatgaggttttggatttttgagtttttgaaatttgttttgttgtttttagagaggaagatttttttttttcggaattttttagatgagtttttagttttagtacgttgggattcgggaaggatatggtatcggagttggagattatattgggttataaggatttttggaattagattgggttgagtatttgtttttaatttatcgggaattcgagggcggttttttcgttattattcggatttttaggatttaggtatttgaatttatattttattggattttggagggcggtttttttttagttttgagagtttaggattttggttttattcgaattttgagagtttaggattttggtattcggttttttttttttatttgtaatttaagtagataggatttgttgtttatattttttaattttggttttttgttatttttaatttttgtttaaaggtttttgattttggatttaaatttaatttttggttttgtcgattgtttatgacggtcgtttattaggagaggttttttagcgcgaaacgtgttgtagttgagcgatagcggcggattttggcgttttggtttagattttttgttcgaagcgtttcgggatttcgttttggagattgcgttttggaggtttcgtaggggtttgtttttttttgcggtaggagggggcgtacggggatttttgttattgaggttgcgtttattattttgggtaagtttttttttatcgtttttttgtggattttaaaaattatatattgggaaaatatcgatttgttagttttagatttaattttaagaggttttggtttttagatttatttagtttttaattgttggttgagtatttatttttcgttaggcgttattttaggcgtttgggttaaatttaaataggtataaattatggtttttaaggaatttattttcggttgaaagacgtggttaataaaaagttattgaagttaattataggggtgttcgaaaataaaggatgattaagagaaaagtaaggtacggaagatgaaaggagttaggtgtaatttgaagttattattatgagagtgagatttttcgagaggtgttatgcgagttgagttttgaagtagatgaaggaggaagttttgggttattgggaggaagggtgttttagaattattttttgtagacgtgtggtttcgtcggggaaagtatttaggttgcggtaggaatggggttgggtaggttttagaaggattttttgaggttggttgcggagattagggtttgtgttattttttgattattttttattagtgtttggtattttatgaaatttcgagtttgtcggtagggtgagttgtttggtgtgtggaggaaggttgggagaggaggaggttaaggtgggtgttagtttcgattgtgtttttgtatttttttttttcgggatttagagttggaaatgtaagtggtattgatgttttttgtaaattttagaattttcggaattggaagaaattttgatatggtaggatgtaaaattaaggaatttttaagttttggaggttttaaggaataattttaagaaagattaagtatgagaaaaaaatgttaaatatgttaataattttttatattgattttatgttaaaattatattttggatgtattgggttaaataaaatattgttaaaaataattttattgattattttttattttttaaaatgtggttattagaaaattaaagattatcgatgtggtttatatttgtgatttatattatagtttattgcgtagtattgttttagaaggttggtaattttagtttttatgtttatatttatgatttatattaaatgagtttttggatatggtgttttttttattttttgttatttttttttttagtattatttgttgaaaatattattttttttttttaaagtattttttagagatatatatgtgtggttttatttatttattttttattttattttatcgatttatggttatttttatgttagtaatataattttgatttttggagttttatagtaagttttgtaattaggtagtgtgtattttttaagttttttttttttaaaaattattgtggatatttaaagttttttagatttttatataaattgataaattagtttggtaatttttttttaaaaaaaatttgttaggatttatttttattttttatttttttaaatttttaggtttagttttgttatgattttgattggaattgtatttaatttataggttagttgtgggagatttggtattttaataatattgaatattttaatttttgaatatagtattttttcgtttttatttatgttttttttatttttttttttgggggtggggttgttttgttttttatttttttttattttaataggtttttgggagaataggtggtgtttggttatatgaataagttttttagtgttgatttttgagattttggtgtatttattatttgagtagtatataaagtatttaatgtgtagttttttattttttatttttttatttttttttttttgagtttttaaagtttattttattatttttatgtttttgtatttttatagtttagttattatttatgagtgaggatatattatgtttggttttttatttttgagttattttatttagaataatggtttttatttttatttaggttgttgcgaatgttattattttatttttttttatggtttaatagtattttacggtatatatatatattattttttttattttttcgatgatttatgggtatttgggttggttttatatttttgtaattgtaaattgtgttgttattaatatgtatatgtaggtattttttttgtataatgatttttttttttttgggtagatatttaatggtgggattgatggattaaatagtagatttatttttagttatttaaggattttttatattgtttttcgtaattgttgtattagtttatatttttattagtagtgtaaaagtgtttttttttcgttatatttatgttaatatttattttttttttggtattttgattatggttatttttgtaggagtgaggtgttattgtattgtggttttgatttgtttttttttgattattagtgatgttgggtattttttttatatgtttgttggttatttgtatattttttttgagaattttttatttatgtttttagtgcgttttttgatgggattgtttgttttgttttttttgatttgtttgaattttttgtagattttggatattagttttttgtcggatgtgtagattaaagatttttttttattttgtgtgttgtttgtttattttgttgattgtttttttgttgtgtagaggtttttagtttaattaaattttatttatttatttttgtttttgttgtatttgtttttgggtttttggttatgaagtttttgtttaaggtaatgtttagaaggttatttttttatgttgttttttaaaatttttatggttttatgttttagatttaagtttttgatttattttgagttgatttttgtataggatgagagaagagaattcggttttatttttttatatatggtttgttaattaatttaggattatttgttgaatacggtgttttttttttagtttatgtttttgtttgttttgttgaagttcggttgattataagtatttggttttatttttgggttttttattttgttttattggtttataggtttatttttatattagtattatgttgttttggtgattgtagttttatagtatagtttgaagttgggtaatgtaatgtttttagatttgttttttttggttagttttattttggttatgtagggtttttttttgttttatatgaattttaggattattttttttagttttgtgaagaatgatgatggtattttgatgaaaattgtattgaatttgtagtttttttttggtagtatggttatttttataatattgatttaatttatttatgagtatgggatgtgtttttatttgtttgtgttatttgtgattatttttagtagtgttttgtagttttttttgtagagattttttatttttttggttaagtatatttttaggtattttatttttgttatagttaaagtaaaaggggttgagtttttgatttgatttttagtttggtggttgttggtgtatagtagaggtattgattttgtataataattttgtatcgtgaaattgttgaatttgtttatttattttaggagatttttggatgagtttttagggttttttaggtatataattatgttattagtaaataacgatagtttgatttttttatgattaatttagatgtattttattttttttttttgtttgattgttttggttaggatttttagtattatgttgaatagaagtggtgaaagtgggaatttttgatttgttttagtttttagcgggaatggttttaattttttttcgtttagtataatgttggttttgggtttgttatagatgttttttatttttttaaggtatgttttttttatgttgattttgttgagggttttttttttttttttttttgagatggagtttcgttttgtggtttaggttggatgtagtggtacgattttcgtttattcgttttttgggtttacgttatttttttgttttagttttttaagtagttgagattagaggcgtttattattacgttcggttaattttttgtattttttttgtagagacggggttttattacgttagttagtatggttttgattttttgatttcgtgatttattttttttagttttttaaagtgttgggattaaaggcgttagttattatgtttaattttgttgagggttttaattataaagggatgttggattttgtgaaatgatttttttgtatttattgagatgattatgtgatttttgtttttaattttgtttatgtggtgtattatatttattgatttttatatgttaaattatttttgtatatttggtaggaaatttatttgattatggtggattattgttttgatatgttgttggattttgttagttagtatttttttttttttttagacggagtttcgtttttgttgtttaggttggaatgtaatggcgagatttcggtttattttaattttcgttttttgggtttaagcgatttttttgttttagttttttaagtagttgggattataggtatgtattattacgtttagttaattttgtatttttagtagagatggggtttttttatgttggttaggttggttttgaatttttggttttaagtgattagtttattttggttttttaaagtgttgggattataggtgtgagttattatattcggttattagtatgttttgaggatttttgtatttatgtttattaggtatattggtttgtagttttgttttttttttgttatgtttttttttggttttggtattagggtgatattggttttatagaatgatttagaggggattttttttttttttattttttggaatagtgttagtggtataggtattattttttgaatgtttgatagaatttcgttgtgtatttatttggttttgggtttttttttgttgttggtatttttttttttttttttgaggtggagttttatttttgtcgtttaggttggagtgtaatagtacggtttttgtttattgtaatttttattttttgggtttaagtgatttttttgttttagtttttcgagtagttgggattttaggtatgtattattatttttggttaatttttttgtatttttagaagagacggagtttttttatgttggttaggttggttttaaattttcgattttaggtgatttgttcgtttaggttttttaaagtgttgggattataggcgtgagttattgcgttcggtcggtaattttttaaattattattttttttttttttttaattgattatttttgggtgttttttatagagggggatttggtagggttataggataatagtggagggaaggttagtagataaataagtgaataaaggtttttggtatttttaggtagaggattttgcggtttttcgtagtgtttgtgtttttgggtatttgagattagggagtggtgatgatttttaacgagtatgttgtttttaagtatttgtttaataaagtatattttgtattatttttaatttatttaattttgagtggatatagtatatgttttagagagtatagggttgggggtaaggttatagattaataggattttaaggtagaagaattttttttagtatagaataaaatgaaaagttttttatgtttatttttttttatatagatacggtaattattcgattttttaattttttttttattttttttttttttttattttataaaatcgcgattgttattttggttcgtttttaatgagttgttgggtatattttttagacggggtggtggtcgggtagagggattttttattttttattaggggcggttaggtagaggagttttttatttttttttcggagggggcggttggtcgggcggggggttgatatttttattttttttttggatggggcggttggtttggcgggggttgatttttattttttttttagatagggtggttgtcgggcggagacgttttttattttttagacggggcggttgttaggtagagggtttttttattttttagacggggcggtcgggtagagacgttttttattttttagacggggtcgcggtagggtagaggcgttttttatattttagacggggcggcggggtagaggtgttttttatattttagacgatgggtagtcgggtagagacgttttttattttttagatggggatggaggtcgggaagaggcgtttttcgttttttagatgggatggcggtcgggtagagacgttttttattttttagattgggtagttaggtagaggggttttttatattttagacgatggacggttaggtagagatattttttattttttagatggggtggcggtcgggtagaggttgtaattttagtattttgggaggttagggtaggcggttgggaggtggaggttgtagcgagtcgagattacgttattgtattttagtttgggtattattgagtattgagtgaacgagattttgtttgtaattttggtattttgggaggtcgaggttggtagattattcgcggttaggagttggagattagttcggttaatatagcgaaatttcgtttttattaaaaaaatacgaaaattagttaggcgtggcggcgcgcgtttgtaattgtaggtattcggtaggttgaggtaggagaattaggtagggaggttgtagtgagtcgagatggtagtagtatagtttagtttcggttcggtattagagggagatcgtggaaagagagggagagggagattgtggggagagggagagggagggggagggggagggggagggggagaggtagagtttaaattattattttaattttattgtttgttattggtttgtttagggtttttatttttttttggtttaatttaggagggttgtatatttttaggaatttatttatgttttttaggttttttagtttatgtgtataaaggtgtttatagtagttttgaatgattttttgtatttttgtggtattggttgtaatattttttgttttgtttttaattgagtttatttgaatttttttttttttttttttggttaattttattaattgtttattaatttgatttatttttttaaataattagttttttgttttatttattttttgtaattttttgttttaattttatttagttttgtttcgatttaggttattttttttttttttgtttatttgggtttggtttgtttttgtttttttagtttttggaggtgcgattttagattgtttatttgtgtttttttagattttttgatgtaggtatttaatgttatgaattttttttttagtattgttttttttgtattttagaggttttgataggttcggttattataattatttaatttaaggaattttttttttttttttttttggagatagagttttgttttgttatttaggttagagtgtagtggtattatttcgttttattgtaatttttatttttcgggtttaagtaaagtaatttttttgttttagttttttgagtagttgggattataggtatttattattatattaagttaatttttgtatttttagtatagataaggttttattatattagttaggttgtttttaaatttttgattttaggtgatttatttattttggttttttaaagtgtggggattataggattgagttattatataggttagtttaaagaatttttgtatttttattttgattgtattgttgatttattgattatttaggagtaggttatttaatttttacgtatgtgtatggttttgagggttttttttggtgttgatttttaattttattttattgtggtttgagagagtatttgatataattttaatttttttaaatttgttaagatttgttttgtggtttattatatgatttattttggagaatgttttatgtgttaatgaatagaatgtatattttgtagttgttgggtggagtgttttataaatatttgttaaatttatttgttttagggtagagtttaagtttattgtttttttgttgattttttattttgatgatttgtttagtgttgttagtagagtattaatattttttattattgttgtgttgttatttattttattttttaagtttagtagtaattgttttataaatttaggagttttagtattaggtgtatatatatttaggattgtgatatttttttgttagattagtttttttgttattatataatgtttttttttgtttttttaaattgttgttgttttaaagtttattttttttgatagaagaatagttatttttgtttgtttttagtgtttatttgtatggaatatttttttttattattttattttaagtttgtatgtgtttttatgtgttaggtgagttttttgaagatagtaaatatttagttggggaatttttatttattttgtaattttatattttttaagtggagtatttaggttatttatattgagtgttagtattgagatgtgaggtattattttatttattatgttagttgttgtttaaatattttttttttttttttgtagtgtgattattttataggttttgtgagatttatgttttaagtaggttatattttggtatattttaagattttggtttaagatttagaatattttttagtagtttttatagtgttggtttgttagtggtaaatttttttagtatttgtttgtatgaaaaatattttattttttcgttgggtatagtggtttatgtttgtaattttagtattttgggaggttgaggtaggcggattatgaggttaggagatggagagtattttggttaatatgatgaaattttatttttattaaaaatataaaaaattagttgggcgtggtggtgggcgtttgtagttttagttatttgggaggttgaggtaggagaatggtatgaatttaggaggcggagtttgtagtgagttgagattgtgttattgtattttagtttgggtgatagtaagatttcgttttaaaaaaaaaaaaaaagaaaaatattttatttttttttttattatttttattggatataaaattttgggttgataattattttgtttaagtgtttaaagattggattttaattttttttagtttgtagggtttttgttgataaatttgttgttaattcgataggtttttttttataggttatttgatgtttttgttttataatttttaagatttttttttttattttgattttagataatttgatgattatgtgtttaggtgatgatttttttgagatgaattttttaggtgttttttgagttttttgtatttgaatgtttaaatttgtagtaaggttagggaagttttttttaattatttttttaaataaaatttttaaatttgtagatttttttttttttttaggaatattaattatttttaagtttggttatttaatatgattttaaattttttggaggttttgtttatttgatttttttttttttgtttttgttagagttaatttgaaagttttgttttagagttttgaagtttttttttttagttgtttgattttattgttgaaatttgttatagtattttgtatttttttaagggtgttttttaggtcgggcgcggtggtttacgtttgtaattttagtattttgggaggtcgaggcgggcggattacgaggttaggagatcgagattatttcggttaaaacggtgaaatttcgtttttattaaaaatataaaaaattagtcgggcgtagtggtgggcgtttgtagttttagttatttgggaggttgagttaggagaatggcgtgaattcgggaggtcgagtttgtagtgagtcgagatagtattattgtattttagtttgggtaatagagcgagattttattttaaaaaataaataaataaataaatataaaaaagtttagagtattaatatttgtttatgatgtaatttgagagtaaatattttttgtatttttaaatgaaattgtgttgggaaatataaggtaaaaaaattgggaaaatttgtttttgttaatagaagatgatgtaataaggaatttagatgaaatataagattagtgtttataattttttataaaaagtgtaatttttagttgtagttttatagttagttaatagtttttaaaaatatgtatagttagttaatagttttttaaagtatgtttatgttgtattaaaagatttttgttaaatattaattgtatttaaatgggttttattgaagtaggatttttatgatatttttaaaagttagtcgtttaaaaagtgaatatgatagggttataataataatattattattttttttttttggttaatatgtttttatttgaaataaatttataggtgttttttaatattatggaattatgaatttttgtagttattagcgttttttaatgattaaaataatgtttatataattataaagttattttattaaaatatttagaagtattttgattttttgaggagtgtttgaaagttttgtttataaatagtgattgttatatttattatgtatttggtgttgaagataaatattttttatataaaatagtgttttaatatattggtttattaatgaggttagttattagatatattgtatgttaatattgaagaataaagttttatttttatatttattttatttgtaggttttttattaatgaagaattttgtatttaataataataaattgttatattgtaagttgtattttgtagaagtaaaaaagattggttgtgacgaaataaagaagatatttgtattatatatgttttttataaatagtttattttgaatggtagaattaaatgtaaattaaatgtttttaaatgtttgtgtgtttagatggtaattataatttttatatatttaaaagaataataatatagaatatagtatttttaatgattgtagtatatttaatatttttagttattattgggtttttagattatattggtaattgaaattttatatttatatgcgtttgttttgttttattattttagagagttttataagtattttagtagtttttattaaattattataagtaagtattttaagtttattgtttgtttttagtgttttaatattattaatttgtgtattttgtaattgtattataataggtattttaatttttaaattttttattgttatgattatattttttgttgtaatattatagtgtatgatttttttataaatgttgattagaatagttagtatttttttatttgaagtgataggtttaaatgtttttgttatttgatggattgtagtattattattaataaggaaattagttggagtttttttatgaagttttattatatttattgtggttatagttaaattagtattatttattaggtagtttatatttttatcgaggttagtgtagttgagatttgttttagtagtatttttgttttttttatttttttgggtttagttttgtagattaaatatttttttttggcgataggttgaattagagttaaaattgatttttgtatttttatataatgtagttttatttgaattttttattattgaatttatttttattatggttgtatcgtattttagaaaaaggttgtaaagtttgattatgttttttgttgttgaagttataatattagatggaaattttattttttgtgtaagttggagagtttatttttttttgatattttttataatattaataggtattttaattattgttttaggagttttagtagtaatatttttaatgttggttttattatgtaaattttttattaatataagattttgaaatgatttttttattgttattgtaaagtagtatttttttttgggatatttttatttatagattaatatttgattgtatattttgttttttttttttatttgtttggtaaataattgttttttaattatttgtgaaggaatagtttttgttttttttggagagaaaattatttttattttttttttgaggttatttttaaatgtttttttttttttattattagttaaaatttgtgtttttattataatattttttgaatttaattttttggtaattgtataagttttatttggttattttgttatatattttttgggaatagagatattagttttttgtaataattttatatttatgtatttatgtagtgagagatttttttgttgttgttgttgtatttggagtttatggttattaaataatttagaattttttagaatttgagtagtagttcgtagtgtggttcgaagggtggcggttattaatagcgggcggaagaatatggaggttattatttttgagtttaatattattattaataaaagttatagaagagattattgttgtagttttttttataaatattattaaatttcgttgtagttataaaaagtataattatgttatttttttttttattaaattttattgttttttatgtttgtaaagtttttatttagtagaagataatttttttatttttttttgtaagaatttaaagtatttaaatgtgtaattttatattatattattatgtttttttttttttgttttatatatatacgtatatatacgtatatatatgtatatatgtatatatatgtatatatatgtatatatgtgtatatatgtatatgtgtatatatgtatatatgtatatatgtgtatatatgtatatatgtgtatatatgtatatgtgtgtatatatgtatatatatgtgtatatatgtatatatatgtgtgtgtgtgtgtatatatatatatatatattttattttttaaaaaggaaattaggtgtttatattttaaagaaattttgtatgggtttggataatgagaagaaaaaattttaaaaagtttataaaaaagttttagagttataaaagatttttatatggtatgaagtgattttttgttagtttagagtttaaaaatattttaatgaagtttatttatatatattttgtttgttttttatggaatattatatttattgaggtgaaattatttgttttttttttttagttatttaagttaataagggtatataagtgttttttaatatagttattaaaaataggagattaatttgaatgtgttagatggattttatttagttgggtttttagagttattaggaagaacgttagagaaaagatttttttgtttggtttttatagtttgatagattaaaaaataaataaataaaatttattataataataaatagtaaaatttttgtttatatagaaatggtttattttttttttgttttttttgatttgatatttgttaagggaatatatttaggaatatatttagatgaaaaagattttgttattttgaatttagtgagttttaatggtttgtttgtagtttttttgattggtttgtagtaatttttgttggtgtagatgttttatagggtaatatttttttaagaatatttttttttatttttttttattttgtttttttttaattttagtggtttttttggagtttggggtatgtttgaaaatttattgagttgtagaataggagttgtatgtttgaaatttttagttattttattgataacgaaggttttgtgttttgaagttattagagttttagttgtgggagtattttttgaaattattgtattgtttattggaaaatgttttggtttttatttttttttttggttttttttttcggtttttggtagattttttattttaggtttgtagagtttcgttttttgaagttttatttgtgcgtttagttttagttattttagcgtgagaatagttttgattattttaagtttttttttttttagtgttattggagtttttgttttgttttttagtggttttgtttttttaagtttgatttttattttagttttttttattgttatagtatttattagaatttttattttaattttgttttttattttttgttgaagattaaattgttaattcgtcgagatgggtagattttttgagtttaggagttggagattagtttggataatacggggaaagttcgtttttattaaaaatataaaaaaaaaaaaaaaaaaaaaaaaaaaaatgtagttaggcgaggtggcgtatgtttgtggttttagttatttaggagtttgaggtacgagaattttttgaattcgggaggcggaggtcgtagtgagtcgagagtcgagatcgcgttattgtacgttagtttgggcgatagatcgttttcgttttttcggttttaaggttttttttttatatcgttttttggttgttttttagtaggattaggtttttttttatatttcgtaagcgggtttacgagatttttattagtgagcgcggttatttcgagattagttttattttttggtttgagttgaattgtttttttcgtggtttttttgttgtgggtggtttggttttggagttagttgggggaggcggggttttcgttgtcggcgtcgcggcggggtagaggtagcggcggggtagaggtagggtcgagtgttgtaggcgaggttgcgcgttttggtttttgcgttgtttcgggtcgggagttttattttaatggcgattaatttatttattaatttgtttttcgttaggatttaggagttttttaggaacgttggtatatttaggagttgcgagtttcgttttcggtagttttcgtagttttcggtttcgttcgagttcgttcgggtttcgcggttttcgtttcggaggagcgtcgcggagtagggtaaaaatttgcggatagaaagttaggttagattcgatataaaagtttcggggttgaacgatgtagatattcgcggttaagtcggaagttcgtattaattttagtttttatattataggttatttattttattttattttttttaaaatgtgggtttttggtttatgtaatttatttcggtgtgatttaggaaggatattggaagtttattgatttggttaggatagaattacgtgtgtgtttaggaaaagtggttttttgttttttatttttaggggtttacgggatatttttagaatagattggttataggaatttttagttaaggtagaaggttgatatgagattagtgttttaggattaagtttttacgaagggtagaaaattgggaagtttatatttttttacgttaattaattggttttataaatattattttatttatgtttttgtgttttttattaataatttttttgagttttattgggagagatgagtatgattgtggagtttagttttgtaaagtatggggtggttaagaaagggaagtaattggttttagaattttatagttatttagtgatttttagtttaagaatttgatggttattgttgtattttaagggaaaggaggttattcggagagaagagaattataagaataagagtgtagagagtgttttatagttttgagattcgtatagaagtataggaggaagtaagtgtttaagtatttagagttttgtgaagtagggattttagtttttaaagttatttttttttatttgttaagttttttgtggacgtgcgtggttgtgtttttttttttattttttttgggtagtgtgttataggtttttatgtgagggttagtattttttgttttttatttttttttttattttgtcgtaaatgtaagggattttatattcgtttttgttttattttttgttttttttggggatattttttttgtttagtagtgggttttgtgaggatttgtaggatagtttgagtgggagttattttaagggtttaaggagttttaggaattttatttgtatttatttatttttttattaagcgtttttgtattttttttgtattgtattttaggtgttgatagtttttgggtagggtagtaggttttagggagtttaggttgaatggagtttgggagttgaggttttttgttggggatttattgttttaagaggataggattttgtttttatgggggaagggttggataggaattaggagattagttataggttcgttgttattaattttgggattagttaattgatttgtgtttagtataggatagtaaaaatggatttgattttttttttgtgtaattttttttagaaattattacgtttagttttttttttttgggtatagaggagatttgttttaggcgaagtttttttgtggaattaaaaagttttttgggtttagttttttttaggggtttttagaatttattaaggatagagttgtagatttttggtggttaaatagggattaaaatcgattatatttataagttaattgtaaattagtttttttttttgttgtatttgtgttttttatttagttatttgttttagatggaagtttcgggttttttttgggttttaattttgcggtttttaggttttcggttttttacgtttaattttaattggttttttttttatatatcgtgtttgattatttagtttatagaacgtttcgggttttttagtgggttaggttttttttagagaggtaagaaggtggagagggagcgtggacgtcgagcgtttgttgggtaaattcgaatttggggtttgatttagtcggtagtcggtgacggggtcggtggtggtttggagatttttttttggttttttgtttttggttttagttttacgtttatagttattttttgaagtcgttagtgttgcgtttttttggttacgtaggggaagagcggattggacggaagtagcggattttgggcgttgttaaggttattgttgtgaaaagtcgggagattagatgtggatatagggaggtttggattcgaggcgcggttggttagaggtttcgtgtttgtttttttttatagtttttagggaagtttttcgcgtatttttaaagtagagagcggtttttaaacggatttttatagcgttcgattgggttatttcgttttaggttggagggtgggtgtttatggggtcgttagttattaagggttttatttgagcgtattcggttttttttttaggttcgtttgggtttcgagggcggcgaatagttcggttttgaagaaggtttcggtcggcgttgtttaagtcgggtagtttttttggtttattcgggagttgagttttaaggtttttcggagaggttagtttagattcgtagcggagagttttttaggttataaatttcggagagaagtagtcgtggttttttgtgttttgggttatcgttgggcggggtaggaagtttttttggcgttttttcgcgggcgcgattacgagtcgcggaaattagtggtcgttttatattatttaagttgaggtttttttgttatggttgcggtttgcggttttagtttagtgtattatttagtattaatattattatttagtgaatttagtgtatttagtgttttaagtttattaagtttattatttattgtatttagtgtatttagtgttttaagtttattaagtttattatttagtgtatttagtttatttaattaatatttagtgtatttagtgttttagtttagtgtagagaggttttttttttttttttttggaggagttagtggttagagacgattttcgtggttagagcgtatttggtttttagaagacgattttggtgtttattgttaattttattagagatcgtaggttttttttttttagttttagtttattagtaaaggtttgggtggttgtttttagaggagattgaacgaggttgttaaagcggttggattaaaagtgttgttatgtcggatggagtggtgtttacgatgaatttgagtatggtattagtatttgggggtgtggaattgggagggaaagttggggttttatagtgtgaggaaggaggagtatggttaaattagattgggtagagttttcggtatttaggaatttttaaatattaaatattaaatttttaaatattaaatattgagttgggatggaatttttgtgttggaggttagtggtgtaaatatttttttcgtatgaggtttagaaaggttaggcggcggttttttatttgtaggtataggtgattgattgtttttagtatgggtttatttgtttatttttttttttgattttggttttattataggagagggaattgggtgttagagggtggggaatttaggatgttagaggtgttatatttggataaagcgttttgaaaatataagttttagggttgattattgattttattatatgtagtttgtttttatttatgaagttttttttttttttttttaatttttaatgatatattataatgtatattaatgtttttaaaatgtatgtagttttttttatttagtgattatattgatttttaagtatttattttttagttaagggttatatttgttttttttattttacggtagtgttgggtttggtgtatttttttcgtagtatcgtttttttttaaataagtacgtttttttataattttttattttttttttatgtttttttattatgtttgtatttattgtgaagtaaggaaacgttttttaattttgttatttttttttatttttaggagatttttttttttgcgttgaggattttattgtgtatttttagttttgggttttggtgggttttggtggttattggagtttttggaattgtttttttttggttttgttgggtgagtgtttttttgttttttgtttttttattgataaaaataaattcgagaatatgtttataataatatttttagaaaggatggtgtggaaggggataaggagtaggggaaggaattttatttttttggatgaatttagagataatttgttatattaatttttggttaggagttaagatagagtttagagtaagttaggttgtttaggttaaatatttgaaggtttttttttttttttttttatattttagtagatttagtgttaagggtttgttttggggataggtggttttagttatagtaaatttttgagattttggattattgcgtggaattttgttttttgtatgaggtaggttttaggtgttatttgttttttttttattttttttgttataaaatatggttttttttttatttttttttaattttttttagttattagttttttggtaagtaattatatggaagttttttattttatattttgttttttatttttatgttttttgataatatatatttatgttattttaaatgtttttattttagatattatgtattgattttttaatattttttttgtttatagtattttttttagtatatatatttttatttttttcgtgtaggtaggtggagattttgagtgtattgagagttagagttaaaattattgatttacgtgaatgttatttagatttgagttatatggtaaatttttttagtttttttttttatatatgttgaagtttttaagatttgattattgtttagtatttttatttttttatttttcgtgaattttaaatgaatttattaattgttttttagttgagtaaatgtttttttaatatttttaaatttatgttggttgttgttaaggttatttttttggagatggttttttttttgttgtttatttatttaggtgattttttttttttttggttttgttgtttttttatttttttatgggttgatgtttgattttatatattttatattttggtattttttttgtttttgttgttggttgatgttgttgttgttgttattttttgtatattttttttttttttgtttggtatgtttttttttttagttttgttattttttaattttgttattaggagaaaattttttatgatttgtaatatttgaattttattttattttatagggttggattcgggtatcgatgttatatttagtaggaataattggggttattggaggatttttaaggatataggttgttttttttatgtaggaagaatttgaatcgtttttatttagttttttcggtatgtagtagaatataatataaggggttgcggttttttttgatttttaaggtttttggaagattttgttttgttaaaattagggtgatttgggtaagtatttttagggttttggattttagtttttttttttggttgattgattgattatataggtgttttaatttatatagttgaaaattagatgtggtgaaagtgtattgagattagaaataatgttattgttttgaaatgtatgtttagagagtattgaataaatttttaaaatatttgattatagttggtatttttgtttttttttaaattatgggattgattaaaagagagaggttaggtggggtgagtgtgggttttggttaggagaatgaaggagggagggagggaaaggttgtgagaagaagtggaaagtagggtataaaggatgtaggatggtgttattgtagggaagggtttgggatttttagtaagtatggaggagaggtggtatttgagattatttttggaagtttagatgtagttgattttataatttgtttttttttttgtttggacgtttatattaatgtgattagatatatagtagaaaagaattggtatttgatttttagattggtattattttttattttcgagtgtttgttttattttttttttttttgtttttttattttaattattaaatttattgttttatttttttaatataattttatattagggtattattgagtttaacgtaatgtgttataatcgttgtgtttttttttttttaagtgtatgattttttatattgtagggttgttgttggaggatggggttggggcggtattggtaattcgggataatattttattttttttagtgttttttttagttatatgaagttaaaaattaggttttgtgaatgtttatataatttttgtttttagtgaaggtgattttgtttttttttaaatgtagatagttgttagattggtatttttgttgtagggggacggttagtgaagttttttatttagttattttgttttatttttttttttaaaaaatttttaaattttttttttaatgtttttattgatttattaggtatttaggagtatattgtttaatttttatgtgtttgtatagtttttaaaattttttttgttattaatttttagttttattttattgttgttagagaagatgtttgatattattttaattttttgaatgttttaagatttgttttgtgattaaatatttggtttgtttttgagaatgatttatgttttgagaagaaatatgtgtattttgtagtttttggatgaaatatgttgtaaatatttattagatttatttaatgtatagtgtagattaagtttaatgtttttttggtgtttttttgtttgaacgatttgttttatgttgaaacgggggttgttgaagtttttggttatgattgtattgagatttatttttttttttagttttaataataattgttttatatagttgggtgttttagtgttggggtatgtatatttatagttgttatagtattttattgaattgatttttttattattatatagtgattttttttgtttttttttatagtttttattttaaaatttattttgtttgatataggtatagttatttttgtatttttttgatttttattggtatgattaatttttttttatttttttatttttagtttatgtgtgtgtttataggtgagtgtgttttttgtaggtaatagattattgggttttttgttttttttttttttttattttttttttttatttattttattattttattttttttgattggagagtttagattatttatatttagtgttattattgataaagaaggatatttttttatttgttttttcgttgttttgtttgttttttttttttttttttttttttttatgttttttttttagtgaaggtgattttttggtgatatgatttaattttttgttgtttattttttgtatatttgttgtattttttatgatttgagattattaggttgtttgtagatattttataattattattttaatttgataaaaatttaatattgtttgtataaataaaaatcgaaagatatgtaataagaatttatattttaattttattttttttttttttaattttttgttgtttttatttatatttttttatattatttatgtttttttttagatgaggattttattgtgttatttagtttggagtgtagtgttataattttagtttattgtaatttttgttttcgaagtataagtaatttttttattttagttttttaagtaggtggtattatagataagtgttattataattagttaattttttttattttttaaaagagattgggttttgttatgttgtttaggttagtttgaaatttttgagtttaaatgatttgtttattttagttttttaatgttttgggattataggtatgagttattgtagttggttttgtatcgtttatgtgttgaaaagttttgtagttattattttttattggtttattttttatgttttttatttaagatacgagtagtttatatattataaatatagtattataatattttgtgtttttttgtggtatttggtttttgattgaagaaattataaagtgttaatttgggtttaaatgtaatttattttttgaagttaagtgttttaaatattttttttgagtttttattagttgtagtttttcgttagagattttatgatttttagtagttagttgttttaatagatgtatattattttttttataggttatttgtgaagtagagtaaagaaggcggttatttatatattgtagtaaggtggaattttaaggagaaattattttttttaagtgtttttttaatatttgaaaaatataggaagggtttttagtaaaagtaagaggttttattgtttaggtgaattgttggttttttaaggtaaaggtaaaaagatattggttggtttgatttattggattattgaagaatgtattttatagattaatgatagtgaaaaattttttattaataggttgtgagtttaatgagatatagggatttggaattattgatgttttggaattattatatagtttattgtttagaatttttgagtaaatttttaattttagttgtttggtttttaataggtaaaattagggtgttagaaggatgagtatatggaataatgaggttttgttttttatgtttttttgtaataggtttaatgatttataatattatttggtttaagtggatattgtttgatattaggtaggggttttgatggattaagttggatttttataggaggtatattataaagtttgttaatattaatagttttgtttatatagagataggtattagatttagtagtgaaagggtgtgatgtagtttgtatatttgtttttattttaattttatgttgaattgtaatttttagtgttggaggtgggttttggtgggaggtgattggattatgggggtatattttttaggaatggtttaatatcgtttttttggtgttgtttttgaaatagtgagagttggttgtttaaaagtgtgtggcgtttttttttttttattttttttttcgtttttgttttcgttatgtgacgtgtttgtttttttattgttttttgttatgatggtaagttttttgcgattttattagaagttgattagatgtttagtatcgtgttttttataaagtttgtagaattgtgagttaattaaatttatttttttttataaattatttagttttatgtattttttatagtaatgtaagaatagtttaatataagatagtattatttttgttttgttagtgggaatgatataataagtggggatatttggagagttagggatttttgaggttaggaatttaagattagtttggttaatatggtgaaatttcgtttttattaaaaatataaaaaattagttgggtatggtggtgggtatttgtaattttagttattcgggaggttgaggtaggataattgtttgaatttaggaggtggaggttttagtgagtcgagattgtattattgtattttagtttggtgatagagtgagattttattttaaaaagaaaaaatttaaaaaaaagtttttaagtagtttttttagtagggtttttaaggggataggtaggtgatttattaaatggataagattagaagtgtatatagtttttttaaattgttggtttttgtattaagtttagtatgttttgaagaaaagttatttataaatttggaattaaagtttatttaagtagatttaatatttataggtaatgtagaaatttttttttttttttttttttttttttttttttttttttttttttaagatggatttttattttgtcggtaggttgtagtgtagtggttggatttgggtttattgtaagtttcgtttttcggatttatattatttttttgttttagttttttagagtagttgggattataggtatttgttattatgtttagttaattttttgtgtttttagtagagacgaggttttatcgtgtaagttaggatggttttaattttttgatttcgtgatttgttcgtttcgattttttaaagttttgggattatcggcgtgagttatcgcgtttagtttagtttagttttaagaaagataagtttggggaatttaaaagattttaaggatggttattgaagatttaaattaattttgttatattttatttattgattttaaaaagtatataagagacgattttaatttttttttttttttatttatttttatttttttttgatatgaagtttttttttttttttttatgttggagtgtaatggtatgatttcggtttattgtaatttttgtttttcgagtttaagttgtatttttgtcgtagtttttcgagtagttgggattataggtatgcgtaattatatttggttgaatttgtatttttattagatacggggtttttttatgttggttaggttggtttttaatttttaaatttaggcgattcgtttgtttgggttttttaaaatgttgggattataggcgtgaggtattacgatcggttttaattttttaaaatagagatgaatttttgttatgttgtttaggatggttttaaatttatgagtttaagtaatttttttatttcggttttttaaggtgttgggattataggtatgagttattgataataatttttgaatatatagttgataggagttttagaagagggtttatattggatgttttggagttttggtattttgttttgttttttattaattttttaatagtaaaagaaaaattttataatttttgtgaggaaatggtaggggttggagcgatttgttttttaatagtgtgtgtttagtataggatttttgtttttatttgatgtgtaggtagtttgtgatttaattgtttattttgttattattttttttagaatttttttgagattggtacgttgtttaatggaaattttgtttatttatgtattattttattttgataataaaaaatttttttttggggagattgaaggtttatatagaatggtgataatagtttaaatagtttttaaggagttgatttatttttattattttagaaagtaaattttgtttttaaaagatatttagaagtagaggaaaaattaagtaataaatttagtataagttttttttaaagataatttttttttaggattatttttgatattagattatttaatttaaaaaatatgatattagaaatgtttaaatatgttgagtttatttgggaatgagaatgaggattgtaatttagggtgtattgatggattgttattttggaaatattagtttagttagatgtagtgggttgaatggtggattttataaagatatgtttttgttttagtgtttagaagttgtgaatgttaagttgtttggaaaaaaagggtttttgtagatgtaattaagcggaggatattgaaatgaggagatttttttagatgatttaggtgggttttagatttaatgataagtgtttttttaataggtatatagaagagagagttagaagaggagaaggtgatgtgaagaatgaggtagagattggagtaatggggttataagttaaagaacgttgattaatgttttgtagttgttagagttggaggatttaaggaatggatttgtttttagagtttttagagggagtgaggttttgtatattgattttgtagtttgggtttttagaattgtgaaagaataattttttgttgttgtaagttgttaattttgagggtatttgttgtggtagttataggaagttaatatattaggtgattaattttaatattaatagtggtatatgaaattgatattttataattttgataaggtgtttggagaatagtattttattttatttaaatatttataattatagtttaattatgatttatattttaattaaatttagtttgagggatattttataatatatttggttagtattttttaatattgtgaagggtattaaaaattaggaaaattttaggaattgttatagattagaggatgtcgcggaggtacgacggagattaaatgtagtgtgatattttttatggaattttgaaatatagaaaggatattaggggaacgttaatgaattttaaataaagtttgtagtttagtaataataaggtatgaaaatgtttttattagttgtgataaatggattatagtaatgagagatgttaatattaggggaaattgtggagcggatggtaattttgtattattattgtaatttttatgtaaatttaaaatttttttaaaataaaattatttaaaagtagtagttacgaaaggattaaggagtggaagaaaaaaatgattaattttttatttttttggagtgttgttatgaaaaggttggagggagggtttgtaaggaggagttggaaattttagagataggtagttttagagtttttttttgtttcgtagagtcggaatttcgcgtagtttagggttttttagaaggtttttttattttttggataattttagttttattttattgatatattttttttggattaataatttgtgttttatttagattatcgtttcgttttttttagagcggtttattagaattcgagcgtagagcggtagcgttttcgtgtggtttaaggattgaggatagatatttagtttttttttcgtttttttattcgcgatttttatagggtttcgttcggtttttagttgtagaatagggttttgtgtatacgggggcgttttgttttcgtgtcggtgtttttaaattttggagtatagatgtttttttttagttattggcggtggagtttgattttaaggtagagggaggtttgtaggttttaagatttggtttttaggtttgcgtgattttatagatatattgtgcgtttagtatttaattttttagtgtttttggaatgaggttttggattttcgagtttttgaaatttgttttgttgtttttagggaggaagatattttttcgtcggaatttattagttgattttttaattttattttggagggatttaggaaggatatggcgttggagttggatttaggaagaatatggcgtcggagttgtaattatattgggttataaggatgtttgggattagattgggtagagtatttgtttttaattcgtcggttatcggagggaggttttttcgcgatttttcggatttttaggatttaggtatcggaatttatatttttttggagcggattttttttagttttagtttaggatttcgagtttcgtttttttttttttttttgcgatttaagtagataggatttgttgtttatattttttaggtttcgttttttgttatttttattttttgattaaaggtttttgatttcggaattaaatttaatttttggtttcgtttattgttcgcgacgattatcgattaggagaggttttttagttttaaataggttgcggttgagcgatagcggcggattttggcgttttggtttagattttttcgtcgaagtatttcgcgatttttgtttggaggttgcgtaggtagttgggggtcgggtttcgtttggggtttcgtaggaggagcggggtttgtagtaggagggggttcgttgggatttttgttattgaggttgtattcgtcgttttgggtaaggttttttttagtttttttttgtggatttcgttgtggttttttttttattttttttgggtagtgtgatataggtttttatgtgagggttagtattttttgtttgttattttattttttagtttgttgtaaagtgtaagcgattttatattcgtttttgttttattttttgttttttttggggatattttttttgtttagtagtgggttttgtaaggatttgtaggatagtttgagagggagttattttaaaggtttaaggagttttcggagattttttgtatttatttatttttttattaagcgtttttgtattttttttgtattgcgttttaggtgttgatagtttttgggtagggtagtaggttttaggtagtttaggttgaggttttttgttggggatttattgttttaagaagataggattttgattttatgggggaagggttggataggaattaggagattagttataggtttgttgttattaattttgggattagttaattgatttgtgtttagtataggatagtaaaaatggatttgatttttttttatgtgaatatttttagatatttttatttttagttttttttttttgggtatagaagagatttgttttaggcgaagtattttcgtggaattaaaaagttttttgggtttagttttttttaggggtttttagaatttattaaggataaagttgtagatttttggcggttatatagggattaaaatcgataaaatttataagttaattgcgatttaattttttttttttttgtcgtagtgttttttatttagttttggatggaagtttcggtttttttttgggttttaatttgcggtttttaggtttttcgttttttacgtttaattttaattgatttttttttttatatattatttttgattatttagtttatagaacgtttcgggttttttaatgggttaggttttttttaagagaggtagggaggtggagagcgagtatggacgtcgagcgtttgttgggtaaattcgaatttggggtttgatttcgtcgtcggtagttggtgaatatgtcgtaggatcggtggtggtttggtagtttttttttgttttttgtttttggttttagattcgcgtttatagttattttttgaagttattagttttgtattttttcggtttcgtaggggaagaggggattggatggaagtcgcggattttgggcgttgttaaggttattgttgtgaaaagtcgggagatttgatgtggatatagggaggtttggatcggaggcgcggttggttagaggtttcgcgtttgtttttttttttttagagttttttgtttttagggaagtttcgcgcgtgtttttaaagtagagagtggtttttaaacggattttttagtattcgattgggttatttcgttttaggttggagggtgggggtttatggggtttttagttattaagtgttttatttgagaggattcggttttttttttaggttgcgttgggtttcgagggaggcgagtagttcggttttgaggggtgtttcggtcggcgttgtttaattcggataatttttttggtttatttaggagttgagttttaaggtttttcggagaggttagttcgtattcggagcggaaggttttttaggtcgcgagtttcggagagaagtagcgttggttttttgagttcggggttatcgttgggcgggagcgcgtttggattttgtagtagttaaagtttcgtgggttttttttcgattataagtcgcggaaaataagttgtagtttagtattatttaagttgaggtttttttgttatgtttgcggtttgttgttttagcgttttgttgttttagtttagtgaaagttgaatgtatttagtattttagtttagttttttagtttagtgtatttagagaagaggttttttttttttttgggggaattagtgggtagagaggaatttcgtggttagagtttatttggtttttaagagtcgattataattttgattttgatttttaattatattcgagattatagtttttcggttagttttagtttattagtaaagggtttggcggttttttttagaggagattgaacgaggttgttaaagcgtttggattaaaagtgtttttttgtcggatggagcggtgtttaggatgaatttgagtattgtattagtatttgggggtgtggagttgggagggaaagttaaggttttatagtgtgaggaaggagattgggtagagttttttagtgtttaggaatttttaaatattaaatattatatttttaaatattaaatattgagttgggatggaatttttgtgttggaggttagtggtgtaaattgtagttttttatttgtaggtatagatgattgattgtttttagtatgggtttatttgtttatttttttttttgatttcggttttattataggagagggaattgggtgttagagggtggggaatttaggacgttagcggtgtcgtatttggataaagtattttgtaaatataagttttagggttgattattgattttattatatgtagtttgtttttatttattaattttttttttttttttttaaattttaatgataaagtataacgtaaattaacgtttttaaaatgtatgtaattttttttatttagtaattattttgattttaagtatttattttttagttaaggattatatttgttttttttagtttttattagtgttgggtttgttgtatttttttcgtagtattgtttttttttaaataagtatatttttttataatttttttttttttttttatgtttttttattatgtttgtatttgttgtgaagtaaggaaatgttttttaattttgttatttttttttatttttaggagatttttttttttgcgttgaggattttattatgtatttttagttttgggttttggtgggttttggtggttattggagtttttggagttgtttttttttggttttgttgggtgagtgtttttttattttttttttttttattgataaaaataaattcgagaatatgtttagaataatatttttagaaaggatggtgttgagggggatcgggagtaggggaaggaattttatttttttggatgaatttggagatagtttgttgtattaatttttggataggaaataagatagagtttagagtaaattaggttgtttaggtaaaaggttcgaaggtttttttttttttttgtttatattttagtagatttagtgttaagggtttgttttgggggtaggtggttttagttatagtaagtttttgagattttggattattgcgtggaattttgttttttatatgaggtaggttttaggtgttatttgttttttttttattttttttgttataaaatatggttttttttttatttttttttaattttttttagttattagttttttggtaaataattatatagaagttttttattttatatgttgttttttatttttatgttttttgataatatatatttatgttattttaaatatttttattttagatattaagtattgattttttaaaatttttttagtttatagtattttttatagtatatatatttttattttttttatgtaggtaggtggagattttgagtgtattgagagttagagttaaaattattgatttacgtgaatgttatttagatttgagttatatggtaaatttttttagtttttttttttatatatgttgatgtttttagagaattgataattgttcggcgtttttatttttttattttttatgaattttaataaatgaatttattaattgttttttagttgagtaaatgttttttttatatttttaaatttatggtggtttttgttaaggttatttttttggagatggcgttttttttgttgtgttgtttatttatttaggcgattttttttttttttggttttgttgtttttttatttttttatttttttatgggttgatgtttgattttatatattttacgttttggtttgtttatttttgttttgtattttttttaatatatattttttttttttttttttggtatgttttttttttttcgagtatattttttatttttgttattgggagaaaattttttatgttttgtaatgtttgaatttttttttattttatagggttggatttaggagttgaggttatttttagtaggagtaattagggttattggaggatttttaaggatataggttatttttagtaggagtaattagggttattggaggatttttaaggatataggttattttttttatgtaggaagaatttgaatggtttttatttagttttttgggtaggtaggagaatttaatacgaggggttgttgttttttttgatttttagggtttttgtaagattttgttttgggtgatttagttgaagggtagggtgatttgggtaagtatttttagggttttgggttttagttttttttattgggtgatgggttgattagatagatggttttttttatatagttgaaaattagatgtggtgaaagtgtattgagatcggaaataatgttattgtttttaaatatatgtttagagagtacgaaataaatttttatttagttggtatttttgtttttttttgaattatgggattgattaaaagagagaggttaggtggggtgagtgtgggttttggttaggagaatggaggagggagggaaaagttgtgagaagaagtggaaggagaggtataaagaatgtaggatggtgttattttagggaagggtttgggatttttagtaagtatggaggagaggtggtatttgggattatttttggaagtttatatgtagttgattttatcgtttgtttttttttttgtttggaagtttatgttaacgtgattagatgtatagtagaatggaattggtgtttgatttttagattggtattattatttatttttaagagttttttttattttttttttttttgtttttttattttaacggttaaatttattgttttattttttttatataattttattaggtatttattttttgggttttagttatgttcgaagaagttttttattaatttattttttgtagagatagggttttgtattgttgtttaggttggttttgaattttcggttttattttagtttattatagtgttaatattataggtgtgagttattgtttttagtttgtgtttgataatgttttgagtgattaaaaggtatttttttttattttgtagttttgggttttttttagtttgttttttttttttttttttgtgattttaggtaggttttgttatttttttttttttttggggtgttttttgggttttagagtagttttggtgagaatttgtagggtaatttgtatattagttggttgggtttttgagtttttttatatttatttatatgttttttttatttttttttagtggtgagatcgggaatataatttattgagtttttaagtttaatggattttttattttagggatgagtattttttagttattttttgtgaagtagagggaggtttttgtttttttttgggttttaattttgtatttttagagttttttattttttacgtttagttattttatttttttatatatatttttggaattaattaattaggttagatggattagttagtttttaacgtgagagttggtagggaagtttttaaataacggtttagtttttttatagtgtgataaaattggttttaaatgttaaatgaaatttttttagtgtatgtttcgtgtgtttagaaatttgttttatatttttttatttatatagaaaagtaaagataaaaataaaataataaaatttaatttttataattaaattttttatgtattattttttttaatagagtttattaataagtttgtgatattttaggatatattgtgttttgtaaatttaaaatattattttatatttgtaaggttaatatttatagagtatttggtatgtttaaggttttagtttaatatttaagtgaatattatttgatttgttttttgtgaggattaatttgattttttaatatgattgggttacgaaggagtttagatatttggttaaatattattttaggtatttttatgagtgtgttcgaaaaatgatttatatttaaattagtggaattgattaatgtatattgttttttataatgtgagtgggttttattagattaattggagatatatgtcgtttatttattttgtttttgtggagagttttgattaatatattgtttataagattagtgttttggggatttattaattaatggaggtatattgtggttatttgtttagtaagttagaagaatattaaagaggaagtgtaagagtcgaaattgttttttagtagaatttagtttgaagtttttttgtagtggtgagtgtggagatgggtttagtagggtggtttgtagtgggtttgttaagggtttttgggattttattggaatttttttttattgaagggagaggtttagtaggtgtttttagtgttttttagagtaaattgggttagttttattaagagtttttttttgaagaagggaattatgattttgattttggaataggttttggagtttgaggtatgagggagaagtttagattttggagaggtggacgaaggaggaggggaattataaagatggggttttgtttttagttagaagtattttgtaattttagggatgaatttaaagatggaagagggggtttttgggaataggaatttttgtttagtatttattttggggggtgaggtggggttttttatgttgtattataagaaatagattttattttatgatagtatgatttatttatggttttgtttttaaatttttgtagatgttgagttttaatagagatgaggaaattgagggttatagagttagtgtttggatggatttataaatgtaggaaggaggtttgattgattttggtgtgatattttttttttttattgtttttttgggaggagtttgattttttttttttttttgtgagatataaaatatatgtagaaaagttatttataaatgtatataatatttaattagcgattatgattatataagtattatttaggttaagaagtatagttgtttagtgttttataaatgttttgtttgtttttttttattatatttttttttttttttagttttatgagtgattgtttttttgatttttgtgttaatatttttttttggttatgtgtttgtaaatattgtgattaaaagattgttttttaattttggttttgttttttttttttaggttgtgttttttttgagtagaaattgttattgtttaaggtgggttgtcggttttggtggtttttagtttttttgggagtttttagaattgattttgtttggttgtgatagtgggtttttttttttttttttttttttttttgtttaggtttttgttttgttacgaatttttatatgttgtatgttgatttcggtgtgaatttaagtgtttatttttttgggataaatgttttagagtgtaatggtatgtttagtttttttttttttttcgttatattttagtttttagagtggttgtattattttatatttttattagtaatgagtgatttagttattttttttatatttagtatgtggtgttatttttattttttattttatttattttgataggggtgtagtaatattttataatggttttaattatatttttttaatgatgaattatatggattatatttttttttttttttttttttttgagatggagtttcgttttgtggtttcggttggagtgtagtggcgcgatttcggtttattgtaagtttcgtatatggattatatttttgtgtttttattttttatttatatattattttaaaagaaatatttgttatgtgttttgtttatttttttattttattgatttttttaaattgttgaatttttagtgtttttatatattaaaaatgaaggtttttttttttttttttttttttttttttttttttttttttttttttaggatacgtgggaaggtagtttgaaatttttgaggttatttaaatttgttttttttttttttttttgggaatagattttggatttaagattttttttaatagtgaaagttattttcgtgggttttgggtttaggatattttaatttggtcgtatattttttgggattttttagtagcgggttgtagaatataacgtttaggagtggggtgtttttttttttcgggtttttggaagacgttgtttcgtttttgattatttggatttttaattattcgaatttagttgaagatttgtgtagtttgggtaagtttttgtagaattttgggttttagtttttttttttgggtattggggtgattatagggtttttttgattaaatttataaatggaaagttttttcggaaagttttttgtaattatagacggtgatgtaatgtaaatttttagaatgattttttaggatttagtcgtaaattttgtttaaatgttatattttatttttagttttgttttttttggaatttttaagcgaaagaagtttgagtagggattagcggataggaggaggaagggaggggttgggaagaagagagttaggcggggtgtagagcgcggcgggggtggttcgtgatttacgcgtggtagggtttattatcgtttttaggtttcgcgtttgcggtcgggtttttttttaggtttttagtttgtttttttattttatttttttttttttttttttttttttttttttttttttttttttttttttttttgaaataatcgttttaataaaatgtagaaaagtattcgataaaatttagtatttttttatgattaaaagttttagtaaaattagtatagaagggatatattttaaagtaataaaagttttttatgatatatttatagttaattttatattgtatagagaaaagatgaaagtattttttttgagaattggaataagacgaggacgtttatttttattattttttttaatatagtattggaagttttagtaagtggtaattttttaaaggttagatataatttgaaattttattattgattatttgtattttgttatgttaaaatagattggtttattttgtttattgaatggatttgtattaataatgaaaataaataaataaaaataaattttatattatgtatgtttagtagttattatatttaatagtgtatatttagagtgtttatagtttttaattttttttaaaatatatggtgggatttttagattgaatatatattaaattatttttatcgagaagttacggatttgtttatatgggttttagatacgtttttaaaatatagtaagtttacgaaagtttaattaatatgtatatgtataagtggagggtatagatattaatcgaaatatgatttattattttaatattttaagtgtttaaaaatgtttattgttagggttaattattgtttatattgtattggaattttgttgttattgtttgttttaattaggtgaatataaggagaagataagtatttattttttttaagataaattattggatatgatatatgttaagtattttgaaggttttgtagatatattttttaaattataaaataagagatttaaattttagaattttttatttgttgttttttttttttttgtattttaataattttgttttttttatttttggatttttttttttttattgttataatttagttggaattatatatgaagtgtttataattgggtagtgaagaaggattttttaagtatgatttaaaaataaatattataaagaagtatgagggtagttttaagtatttataaattaaaaaatttttttttggtaattataaatatagatatatatagatagttttttataattaattttaaagatatataaaaaatttatagataaaataataatgcgttcgaagtttttttttaaagtttattaggaatatattttagtgggtgaagaagttgggtttattattggtttttgagtgtaagaataggtgttgtgagttatgtggtgttttggtaagagggtgttagaaagaaatttttaaaggatttgggttttggttgggtgattttggggagggtgaggaagtgggttttattttagattgggtattcgttaggaagtaggggtaattttgtaattgaatgttttaataaattttagttttagtgagggtggattagagtagaataaagttgtaattggtagataagtattagtttttggtattagtggagagagtgtttagataaaattatgaagtgtttttgtatttttttattttattattattttagagtgaattttttaatgttggtattttgtggtgattgtggtttaataggagaataatatggtttaataatgaatattgggttagttttatataataaggagttttagttataagtgttagattagtttttagatattagaggttttttgtttttttttttaaatttaatatttaaaaatatttacgttttatttggaaaaggattaatgaatattagagtataatttggtatagaaaatgtaagtgttaaatataatagtaataagtaaatgttaataaaattaaaatgtggattaggaaatgggatggaagtttaatatattttagtttggtaaagatgaaagttaaagataataatattgagtggagaataggggaaatttattgttataaaagttgatgggattaaatattggtatataatttttaaagagttaggtatgttggtttaatgtttgtaattttagtattttgggaagttgaggtgggtagattgtttgagtttaggagttttagattagttagggtaatatggcgaaattttatttttataaaaaatataaaaaaaattaggtatggtggtatttttttgtagttttaggaggatcgtttgagtcggggaggttaaggttatagtgagttgtgattatattattgtattttagtttgaggaatagagtgagattttattttaaagaaaaaatattttagtgtttaaagagtatttttggaaaatgttttaagaagattatgttgatgtaaaaaatttattttttaaaaatgtagtttaagaagaaaattatacgtttttaaaaatatataataagaatattttttgaattatcgtttataaaataaaagaatgaaaataattaaaatagtataattaatatgatgttagttatgaattgtggatatttaatatgttttagttagtaataatgtgtataatatatagataatatataatttaattattagagaaaatttattaggaatttattatgtgatttagagaggttgaggaggtggtgaagttggattgaagttaggagatttttttttagatatttaattgatttattttttgttgatgttttgtttataaggtaggtgagtgtgattttgtattttatgtaagtgaattattttaatgttcgtgaatattttatgataggtagttgttaggtttagagttcgggaggataaaagggtatgtgtgattttattgtttatattatattaaagtttattattcggtgtatattttaaggtgaattaagatattagttagatattgaagatagaagaagagttaaagtaagattttgatgatatggagtttgtattgttatgagagagacggatatttagtaaaaattattaagataaatgtgaaattattatatttatgaattttgagagaaaattttataatattatgaaagaagataataaggagatttaataagttttttgttattattattaataatatataaaggatgtaagaaaataagtggtatttatgaaataggaatttatttatgtaaaattatatataagaacgagttttggaaattaaaaatgtgattatagaattatagaaatgaataatttattagataatttggaagataaaagttataataaaatggaaaaatgtttgtaaaaaagaaagaaaaagtgtaagaatattatattattaggttaagtgtggtggtttaagtttataattttagtgttttggaggttaaggaaagagaattgtttgagtttaggagtttaagattagttagggtaatataaggagatttcgtattaaaaaaataaataaataaataaataataaaaaatgtaatgttttaaaagattatatgaagaatagatttagagattgttttatgaagattgttatagtatagggtagtagttgtagggagatatgggattagagattaagggataaatttcgatgggaagattttgttttgatttgtttagtttagttttgtttgtttttttggggggagatattatagtacgtttgtttgtagaaatgatgggttagtagagagtggaaattgatgatataggggaaggaaggattgattttatgtttgagtgtaggggtggttttaggagcggggattatttattattattggtgggaaggttgaggatataagtgtagatttggggatagtaatgggatggtgatgtattttttatttgggttttttttttttttttgcgtgaaagagaaataaatgtataatttaaaaatagggagtgtggaaggagtggagggatgtgagggtagagaataaagtgagaaatagttttttgaggaattgtaagagtgaattgatttgggagatggtatttggagagtgtagggttgtgggttattgaggtttgtggttataattttgggggtgggagagagagagagagagagagagagagagagagagagagagagatagagagagagagagagaatggtatatatttagtaatggggtagtagtaggaaaatatataattgattagaaggaaatgaaattatatatttttgttgtaaggattatgggatagtttaaatttgtaattgattatttgaaatatttggtaatttttttgtagtgaatatatattatattataatgagaaaaagttatatttataaattaaaaagggaatgttgatggagaaagtgtagataatttagaaatattagagaggatagaatatattgaagggaataaaaataattgtttttttttttaatttaattcggatttttatattaattatttatatgttttgtttttagagggatttaaaagtttgttttattttaaatgtttttttatagggtgatatggaattttagggtaagatttggtttttagaatttattattttttagagaatatggtgttttatagaagaaaattattattattaacgttgttattagtattataaattgtagtattagtaattgtgttaaatgtgttataagttttattgttatttaatttaatttttatataaaagaaagtatttatagataaagaattgagttttatgaagttttaaatagttttttgtatgttatgttgattagagtagttttaggatatttaggtttgtttgattcgaagatttaggttttttaaataaatatatattattttggttttataaggaatgggtagtgttttgtatatgtgttatatttcgttttttgtgttggtgttttgtatttattattttatattatttttatttagtttatattatgttttattaggttggatggatttatagtattagtggatttttattttggattatgtagatgatgtgaattttagttgtagatttttgtgaaaaggatcggtttttttatttatttttatttagataagttgtgtgtgtgtttgtgtgtgtagtttaatgtagatttttaattaaaggtagtagagagtggaataattattggttgattaagaatatatttatagtttatagtatgatttatttatttttgtattgttttgtttttattaattgtagtaagtgttggatgttttttatatggttaataaggtgttttttttttttaagtttgtagttttttttttttgtttattttaattttaaaattttaattttgttttgttattgtattaagtgtttgtttaagggtagtaattattatttttttagttttttatatttttagagtaggtattttaaagataaaatatttttttatgagtagatgtaaagtgatatagtatagtatagtattaattgattattgtgtagaaatttttatttagtgagtgagaggagggatgaaaagggtgaaaagggtaattttattttgttatgttttattgttattaattggggatattatttttagtttatatattaagaaattaatgtttagtaatgagggtaatttgtttatagtaataaaaaaatggtaaaggttatgtttaaatttagattaattttattttagggtttatgttttttttatatattattttttgtggttaaagttattggtagtagttattgaagaggttttaggtgtaggaatgtttagggttttttttttttttgagatagggttttgttttgtcgtttagtttggagtgtagtggtatgaatatagtttatcgttgttttgattttttgggtttaagtggtttttttgttttagttttttgagtagttgggattataggtatgtattattacgttttattaattttttttttttaagagatagggtttgttatattttttaggttggagtgtagtggtatgattataatttattgtagttttaatttataattttagtttgttaagtagttgggattataggtacgtgttattatatttagttaattataatttttttttttttttggtaaagatgtagtttttttaagttgtttaggttggttttaaatttttaggtttaagtgatatatttttttttattttttaaagtgttgagattataggtatgagatattgtatttggttattattgatttttgtatgttgattttgtattatgtaattttattgaatttgtttattagttttaatagttttttggtggagttttgtagatttttttaaatataagattatattatttgtaaataaggataatttgatttttattttttttttttgtttgattgttttagttagggtttttaatattatggttaataacggtggtgaaagtaggtaattttgttgtgttattgattttagaggaaaggtttttaatttttttttatttatttagtatgatattagttgtgggtttgttgtatataatggtttttattatgttaaggtatgttttttttatatttagttttttgatagtttttattatgaaggaatgttgaattttattgattgtttttatagtattaattgaaatgattatatggtttttgttttttattttgttgaatatgatgtattatattgattgatttgtatattttgaattatttttgtatttttaggataaattttatttggttatgaggaatgatttttttaatgtgttgtcgatttttatttgttagtattttgttgaggatttttgtaataatatttgttagtaatattggtttatagttttttttttttgatgtgtttttgttcggttttggtattagggtaatattgtttttgtaggatgattttggaagtatttttttttgaattttttggaatagtttgaataggattggtattagtttttttttaaatgtttggtagaatttagtagtgaagttattagggtttttttttgttgggagattttttgttatgatttttatttgattatttgttattggtttgtttaggttttggattttgtttattatttaatttgggtaggttatatgtatttaggaatttatttattttttttaggttttttaatttattggtatgtagttgtttatagtagttattgatgattttttgaatttttgtagtattagttgtaatgttttttttttatgtttgattttatttatttgggttttttgtttttttttgttagtttggttaatgatttgttaattttgtttaattttttaaaaaatttattttttgttttattgatttttggtattgttttttttattttaaatttatttatttttgttttgatttttatatttttttttttttattaattttgggtttggtttttttttgtttttttagttatttaagatgtattgttgtattgtttatttgaagttttttttttttttttgatgtagttatttatagttataaattttttttttagtattatttttattgtattttttaggttttggtatgttgtatttttattattatttatttttagaatttttttaatttttttttttataaataaataaatatatatattatatatattttatatatatatttttttttttttaattttatttatttatttttattatattttaagttttagagtataagtgtataatgtgtaggtttgttatataggtatatatgttggtttgttgtatttattaattcgttatttatattaggtattttttttaatgttattttttttttagttttttttttatgattgttttcggtgtgtgatgttcgtcgttttgtgtttaagtgtttttattgtttagtttttatttatgagtgagaatatgtagtgtttggttttttgtttttgtgatagtttttttagaatgatggtttttaattttatttatgtttttgtaaaggatatgaatttatttttttttatggttgtttagtattttatggtgtatatgtgttatatttttttaatttagtttattattgatggatatttgggttggtgttaagtttttgttattgtgaatagtgttataataaatatatgtgtgtatgtgtttttatagtagtttgatttataattttttgggtatatatttagtaatgggattattgggttaaatggtatttttagttttagatttttgaggaattgttatattgatttgtataatggttgaattagtttatatttttattgatagtgtaaaagtgattttatttttttatattttttttagtatttgttgttttttgattttttaatattattattttaattggtatgaatgttattttattgtggttttgatttgtatttttttgatgattagtgatgatgagtatttttttatgtgtttattggttgtataaatgtttttttttgagaagtgtttgtttatatttttggtttattttttgatggggttgtttgttttttttttgtaaatttgtttaagttttttgtagattttggatattagttttttgttagatgggtagattgtaaaaatttttttttattttataggttgtttgtttattttgatattagttttttttattgtgtagaagttttttagtttaattagattttatttgtttattttggtttttgttgtcgttgtttttggtgttttagttatgaagtttttgtttatgtttatgttttgaatggtattgtttaggtttttttttagggtttttatggttttaggtttaatatttaattttttaatttattttgaattaatttttgtataaggtgtaaggaagggattttgttttagttttttatatatggttagttagtttttttagtattatttattaaatacggaattatttttttattttttgtttttgttaggtttgttaaagattagatggttgtagatgtggggtgttatttttgaggtttttgttttgttttattggtttatatttttgttttggtattagtattatgttgttgtggttattgtagttttgtagtatagtttgaagttaagtagcgtgatgtttttagttttgtttttttggtttaggattgtattggtaatgtaggttttttttttggttttatatgaattttaaagtagttttttttaattttgtgaagaaagttattggtagtttgatggggatggtattgaaagtgtaaattattttgggtaatatggttatttttacgatattgattttttttatttatgagtatggaatatttttttatttgtttgtgtttttttttattttgttgagtagtggtttgtagttttttttgaagaggttttttatattttttgtaagttggatttttaggtattttattttttttgtagtaatcgtgaatgggagtttatttatgatttggttttttgtttgtttgttattggtgtatagaaatgtttgtgatttttgtatattgattttatattttgagattttgttgaagttgtttattagtttaaggagattttgggttgagatgatggggttttttagatatataattatgttatttgtaaatagggataatttgattttttttttttttaattgaatattttttattttttttttttgtttgattgttttggttagaatttttaatattatgttgaataggagtggcgagagacggtatttttgttttgtgttagtttttaaagggaatatttttagtttttgtttatttagtatgatattgattgtgggtttgttataaatagtttttattattttgagatacgttttattaatatttagtgtattgagagtttttagtatgaagggttgttgaattttgttaaaggttttttttgtatttattgagataattatgtggtttttgttattggtttagtttatgtgatggattatgtttattgatttgtatatgttgaattagttttgtattttagggataaagttaatttgattgtaatggataaattttttgatgtgttgttggatttagtttgttagtattttattgaggattttcgtattgatgtttattagggatattggtttaaaatttttttttttgttgttgtgtttttgttaggttttggtattagaatgatgttggttttataaaatgagttagggaggatttttttttttttattgattggaatagttttagaaggaatggtattagtttttttttgtatttttggtagaatttggttgtgaattcgtttggttttggattttttttggttggtaagttattaattattgatttaattttagagtttgttattggtttatttagagatttaatttttttttggtttagttttgggagggtgtatgtgttgaggaatttatttattttttttagattttttagtttatttgcgtagaggtgtttatagtattttttgatggtagtttgtatatttgtgggatcggtggtgatattttttttattattttttattgtgtttatttgatttttttttttttttttttttattagttttgttagcggtttattaattttgttgatttttttaaaaaattattttttggatttattgattttttgaagggttttttatgtttttatttttttaagttttgttttgattttatttattttttgttttttgttgttttttgaatgtaaagtttgtttttgtttttttagtttttttaatcgtgatgttagggtgttaattttagattttttttgtttttttttgtgggtatttagtgttataaatttttttttatatattgttttaaatgtgttttagagattttggtatgttgtgtttttgtttttattggttttaaagaatatttttatttgtgtttttattttattatgtatttagtagttatttaggagtaggttgtttagtttttatgtagttgagcggttttgagtgagtttgttaattttgagttttagtttggttgtattgtggtttgagtaatagtttgttataatttttgtttttttatatttgttgaggagtgttttatttttaattatgtggttaattttggaataagtgcggtgtggtgttgagaagaatgtatattttgttgatttggggtggagagttttgtagatgtttattaggttcgtttggtgtagaattgagtttaatttttggatatttttgttaattttttgtttcgttgatttgtttaatgttgatagtggggtgttaaagttttttattattattgtgtgggagtttaagtttttttgtaggttatttaggatttgttttatggatttgggtgtttttgtattgggtgtatatttatttaggatagttagttttttttgttgaattgatttttttattattatgtaatggttttttttgttttttttgatttttgttggtttaaagtttgttttattagagattgggattgtaatttttgtttttttttgttttttatttgtttggtagatttttttttatttttttattttgagtttatgtgtgtttttgtatatgagatgggttttttgaatatagtatattgatgggttttgattttttatttaatttgttagtttgtgttttttaattggagtatttagtttatttatatttaaggttaatattgttatgtgtgaatttgattttgttattatgatgttagttggttattttgtttgttagttgatgtagtttttttttagtatcgatggtttttataatttggtatgtttttgtagtggttggtattagttgtttttttttatgtttagtgttttttttaggagttttcgtagggtaggtttggaggtgataaaatttttgagtatttgtttgtttgtaaagtattttattttttttttatttatgaagtttagtttggttggatatgaaattttgggttgaaaatttttttttttaagaatgttgaatattggtttttagttttttttggtttgtagagtttttgttgagagattcgttgttagtttgatgggtttttttttgtgggtaatttaatttttttttttggttgtttttaatatttttttttttattttaattttggtgaatttgataattaatgtgttttggagttgttttttttacggagtatttttatggtattttttgtattttttgaatttgaatgttggtttgttttgttaggttggggaagtttttttggataatattttgtagagtgttttttaatttggttttattttttttgttatttttaggtatattaagttaatgtagatttggtttttttatatagttttatattttttggaggttttgtttatttttttttatttttttttttttaaatttttttttttgttttattttatttatttgatttttaatttttgttatttttttttttagttgattgaatcggttattgaattttgtgtacgtattacgtagtttttttgttatggtttttagttttattaggttttttaaggatttttttgtattggttattttagttagttattcgtttaattttgttttaaggtttttaatttttttgtaatgggtttgaatttttttttttagtttggagaagtttgatcgtttgaaggtttttttttttagtttattaaagttatttttcgtttagttttgtttcgttgttggtgaggagttgtatttttttggaggaggagaggtattttgagttttagaatttttaatttttttgttttgttttttttttatttttgtggttttatttatttttggtttttgatgatggtgacgtatagatggggttttggtgtggatgttttttttgtttgttagttttttttttaatagttaggatttttagttgtaggtttgttggagtttgttggaggtttattttagattttgtttgtttgggtattagtagtagaggttgtagaatagtgaatattgttgaatagtaaatgttgttgtttgatcgtttttgtggaagttttgttttagaggggtatttggtcgtgtgaggtgttagtttgtttttatagggagatgttttttagttaggttttttaggggttagggatttatttgaggaggtagtttgtttatttttagattttaaattttatgtcggaagaattattattttttttaaagttgttagataggtatatttaagtttgtagaggtttttattgttttttgttcggttatgttttgtttttagcggtggagtttatagaggtaggtaggtttttttgagttgtagttggttttatttagtttaagttttttagtcgttttgtttatttatttaagttttagtaatggtgggcgttttttttttagttttgttgttattttgtagtttgattttagattgttgtgttagtaatgagggaggttttatgggtttgggatttttcgagttaggtgtaggatataattttttggtgtgttatttgtttagattattggagaagcgtagtattagggtgggagttattcgattttttaggtgtcgtttgttatagttttgtttggttaggaaaaggaattttttgattttttgtgttttttgggtgaggcgatgttttgttttgttttagtttatgttcggtgtattgtatttattgttttgtatttattgttcgataagttttagtgagatgattttggtattttagttggatatgtagaaattatttattttttgtatggtttacgttggaagttatagattggagttgtttttatttggttattttggaattgttttttagtgttgtgtaggtttttgtaaagagattgtttatttttttgtttaaatttatttttgtttttttggggggtttttgtcgttattataaatgggattgtttttaaattttttttttagttattttattattaatgtgtagatattatattgatttttgtatgttgattttgtattttgttattttattgaatttatttattggatttaattgttttttggtggtatttttagatttttttagatataggattatattattggtaggaaggtaagagaggttgaaggttaagttgatggttatgatgtaatgaattatgtttaagaaatatggtttttattaaaatttaaaagggaagagttagagagtttttgtatggttgaatatagggaggtttataggaaggtgaataataatttagatatgtgttagggagggtagtattttttaaatatatggggtagaagtttttgtatttaagatttttttagattttattttatgtatttttttatgtggtttttatttttttatgtggttttttattttttaaaatatttttttaaataaattggttaatgtatgtaagtgttttttggtatgttatgagttattttagtaaattaattaaatttgagggtgggttttgggaattttgatttatagttagtgagttagtaatataggtaaaataatttggggtttgagattgttattagaagtgagagggtgatagtcgtgaggattgagttattaatttgcgggatttaaaattatttttagggagatagtgttagaattgagttagaggatatttagttggcgtttataatagaatcgattgtttgtttgtttttggggagaaattttttacgttttatcgtagaagttttttgtgttgatagttgttggggtgtaagaatagtagaaaaaagattttgaatttttttataaaattttgttataaaaatgtggttaaaagattttttaaaaattggtatatttgtttagagtatttattatgaatggagtttataggattggaaattgttttgggtgttagtgagtggcgagtgaatgtgaagtttagggtattattatatattatttagattttataaatattgtatatttaggttatattaaattaattttaaaaattattttttttttttaataataaattaattttagtttattgtaattttttaatttttttttttttattttttttttaagtttaggggtatatgtatagaatgtgtaggtttgttacgtaggtaaatgtgtgttatggtggtttgttgtagagatcgttttattatttaggtattaaggttaatatttattggttattttttttggtgttttttttttatagttttatgttttttaatagattttagtgtgtgttgtttttttttatgtatttatgtgttgttattatttagtttttatttataagtgagaatatatggtgttttgttttttgtttttgggttagtttgttgaggataatggttttttattttatttatgtttttgtaaaggatatggttttatttttttatgtggttgtatcgtattttatgttgtatatgtattatattttttttatttagtttattattgatgggtatttatgttgattttatgtttttgttattgtgaatagtgttgtaatgaatatatgcgtgtatatatttttataatagaatgatttatatttttttgggtatgtatttagtaatgagattgttaggttaatttttgtttttaggtttttgaggaattattatattgttttttataatggttgaacgaatttatatttttattaatagtgtgaaagtattgttttttttttgtgattttattagtatttcgttttttgatttattaatagttattttggtattttattgtggtttttatttgtatttttttaattattagtgatgtttaattttttttatatgtttgttggttgtatgtatgtttttttttgagaggtgtttgtttatgttttttgtttattttttaatggggttgtttgttttttttttgtaaatttgttgaagttttttgtaaattttggatattagatttttgttagatgtatagattgtaaaaatttttttttattttgtaggttgtttatttattttgttgatagttttttttgttgtgtagaagttttttagtttaattaattttattagttaatttttgtttttgttgtaattgtttttggagtttttattatgaaatttttgtttatgtttatgttttgaagagtattgtatagatttttttttagcgtttttatagttttgggttttatatttaagtttttaatttattttgaattaatttttgtatatagtttaaggaacgggtttagttttaattttttgtatatggtaagttagtttttttagtattatttattaaatagggaattttttttttattatttgttttggttagatttgttaaagattagatggttgtaggtgtgtgattttattttatagttttttattttgttttattggtttatgtatttgtttttgtattagtattatgttgttttagtattgtaattttgtagtatagtttgaagttaggtaatgtgatgtttttagttttgttttttttgtttagaattgttttggttatttaggttttttttttggttttatatgaatttaaaaatagttttgtttttttttttaggttaggcgtagtggtttacgtttataattttagtattttgggaggttgaggtggatagattatgaggttaggagtttaagattagtttggttaatattgtgaaattttatttttattaaaaatataaaaattagttgggcgtggtggtgcgtatttgtaattttagttatttgggaggttgaggtaggagaatcgtttgaattcggggacgcggaggttgtagtgagtcgagattacgttattgtattttagtttgggtgatagagtaagattttattttaaaaaaaaaaatagtgttttttttttttttaattttgtgaagaatgtttatgatagtttaatgggaatagtattaaatttataaattattttgggtagtatggttatttttatgatatggattttttttatttatgaatatggaatgttattttatttgtttgtattttttttgatttttttttgagtagtggtttgtagttttttttgaagaggttttttattttttttgttagttgtatttttaggtattttattttttttgtaggaattgtgaatgggagttgatgatttggttttttgtttgtttgttgttggtatataggaatgttagcgatttttgtatattttgtattttgagacgttgttgaagttttttattagtttaagaaattgttgtttttatgatggtgaaattaatataagtggtgagaggtttgtttggtgtcggtttttaaggggaatgtttttagtttttgtttatttagtatgatattggttgtgggtttgttatatattgtttttattattttgagatttttttttttaatatttagtttattaagagtttttaatatgaaagtatattgaattttattaagtgttttttttgtatttattgagataattatgtggtttttttttttagttttgtttatgttatgaatcgtatttattgatttgtgtatgttgaattaattttgtattttggggatgaagttaatttgattgtgatgaataagttttttgatgtgttgttggattcggtttgttagaattttattgaggattgttgtattgatgtttattatgtatggttcgaagttttttttttttgttatatttttgttaagttttggtattaggatgatgttggttttttaaaatgagttagggaagagttttttttttttaattgtttggaatagttttagtgaaaatggtattagtttttttttgtatttttgatagaatttagttattaatttgtttggttttcggttttttttggttggtaggttatttattgttttaattttagaatttattattggtttgttaagagttttaatttttttttggtttagttttgggagggtgtatgtgggtaggaatttattaattttttttagattttttagtttatttgtatagaggtgttcgtagtattttttgattgttgtttgtatttttgtggggttagtggtaatattatttttgttatttttgatttgtttatttgatttttttttttttttttttttattagtttagatagtggtttattttattaatttttttaaaaaaatagtttttagatttattaacgttttgaagggttttgtgtgttttttttttttttagtttagtttcgattttggttattttttgttttttgttagttttgggatttgtttttgtttttttagtttttttagttgtgatattagattgttaatttgagatttttttggtgttttgatataggtatttagtgttataaatttttttttttatattgttgtagttgtgttttaaagattttgatatattgtttttttatttttattagttttaaataatttattgatttttgttttaatttaataatttatttaatagttatttaggagtaggttgtttaatttttatgtagttgtatggttttgagcgaattttttatttttggtttttaatttgattgtgttgtggtttgagagattgtttattatgattttagttttttttgtatttgttgaggagtgttttatttttgattatgtgattaattttagagtaggtgttgtgtagtaatgagaagaatgtatattttgttgtttttgggtggaaagttttgtaggtgtttattagatttatttgatttaaagttgagtttaagttttgaatttttttatatttataaattttaattttttaaaaaatttaattattttgtaatagtatttagtttaaaatattagtatattatttagttatataaaaatatttttttttatatttttattttagaaattatttttatttaattttttaattttttaattttttttggtaaaaataaagatatatattagtttaggttgatatagggttaggattaataatattattaattttagtttttatattttgttttattgttattttataggtaataataagtatggaattgttattttttgtgataataatgtttttttttggaatattttttaaaggatttgtttgacgttgttttaatttaatttaaaaaataattagagtatattttaaaattattataaaaagtatagtaaatatataaattagtaatatatttattattattaagtattatatgttgtttttaattgtatggggtagatttttataggattggtagtgtagtaggtttatttatattagtattattataagtatatgattaatgtattgtgttatgatattataatggttataatgttattaggtgataggaattttttagtttcgtttaataggatgatagtcgtatacgtgattaattattgatagaaatattattaagtagtgtatgattgtataatatagtgatgtgtgtgtgtgtgtgtgtattttgtgtgtataaggttgttaaagatgaaattgaggttttaattgggtattaagatataatatattaattttgtttgtgaattgttaaattattttatttagatttttaaatgtaatgattattgaaggattagaggttttttgatttgaattgtgatagattagtttatttaaaatttatttttttattgtaaataagtataaaagttagataaaatacgatgtagttgtgtagttgtaaaatagtagttagagtaggattattattttttagggaatggagtttttgaaagagagatttatatttttattagttttttttttaagaggattttttttaaaatttaatgaagggaaatggaatttaagtagagagaattaattttagtagtaaaggaattagagattagagtttaggtttggtattttgattgggatttaagggtagggtgttgaaggagggagttatagcgaagaaatttttaaaatttgtattttaaagttgtatatgttttaggtgatattgtaagaagtttattagagaatagttgtttggggattgtatgttatgtagaaatgttaaaggttttatagtgtgaggagatattggaattaatttagtttagttaaattcgggttgagatatgaggatggtgaagtattatgagtgagggtcgtggttttggagtaagtattatattgaaatagtaaagtagtaaagtttaaaattaagttttgggaaaggattttttatttaataaatggtgttgagaaaattggttagttatatgtagaaagttgaaattggattttttttttatattttatataaaaattaatttaagatggattaaagatttaaacgttagatttaaaattataaaaattttagaagaaaatttaggtattatatttaggatataggtatgggtaaggattttatgtttaaaatattaaaagtaatggtaataaaagttaaaattgataaatgggatttaattaaattaaagagtttttgtatagtaaaagaaattattattagagtgagtaggtaatttataatatgggagaaaatttttataatttatttatttgataaagggttaatatttagaatttataaagaatttaaataaatttataagaaaaaaaaaattattttattaaaaagtgggcgaaggatatgaatagatattttttaaaagaagatatttatgtagttaaaaaatatatgaaaaaatgtttattattattggttattagagaaatgtaaattaaaattattatgagatattattttatattagttagaatggtaattattaaaaagttaggaaataataggtgttggagaggatgtggagaaataggaatatttttatgttgttggtgggattgtaaattagtttaattattgtggaagttagtgtagtaattttttagggatttagaattagaaatattatttgatttagttattttattattgggtatatatttaaagggttataaattatgttgttatatagatatatgtatacgtatgtttattgtagtattatttataatagtaaagttttggaattaatttaaatgtttaataatgatagattggattaagaaaatgtggtatatatatattatggaatattatgtagttataaaaagtgatgagtttatgttttttgtagggatatggatgaaattggaaattattatttttagtaaattaacgtaagaataaaaaattaaatatcgtatatttttatttataggtgggaattgaataatgagaatatatggatataggaagtggaatattatattttggggattgttgtggggtggggggaggggggagggatagtattgggagatatatttaatgttagatgacgagttagtgggtgtagtatattagtatggtatatgtatatttatgtaattaatttgtatattgtgtatatgtattttaaaatttaaagtataataaaaaaataaataaaataaaataaaataaaataaaattaagtttaagtagaattaaagtgggttcgatttttattaaaggtaatttttttataattaatgaattattaaattgttagtagtttgtggaggaagatggtaaaatttagagtttttataatatattatttagaatatgtggtatgttaagtagtagagaaaatgtaataagtagagataaaattagattaagaattttatggtgtatatgtattatatttttttaatttagtttattatattatgtagttataaaaaatgatgagtttatgttttttgtagggatatggatgaaattggaaattattatttttagtaaattatcgtaaggagaaaaaattaaatatttcgtgtttttatttataggtgggaattgaataatgagaatacgtggatataggaaggggaatattatatatcggggattgttgtggggtgggggaagtggggagggatagtattaggagatatatttaatgttaaatgacgagttaatgggtgtagtatattaatatggtatatgtatatatatgtaattaatttgtatgttgtgtatatgtacgttaaaatttaaagtataataaaaaaaattaggttaagagttgatgtggatattgaagtaggtaagtaagaatatttttaaagtatttatgattaatatgttaaggaaaatagagggaaagatgggtaaattattttaaaatttttagaaagattaattataaaaagagagaaaatagaaatgaatattataaagaataatataaaatcgtatattttattaaaatgaaaataagagaatattagatataattttttgataatattttttaaaatttaggtgtaatgaaatgagtttttgaaaacgataattgaataagttaatagaaaattgaatagaaaatataagtagttttatatttattaagaaatgggattttaattaaatttttttttattaaaaatattttttgtttacgtttttttttttgttaatttttttaaaattttttttaaaaaagttagttttatttagttattttttggtatttttttgggatgggatttagggttttttgtggatattaaaatttatgaatgtttaggttttatgtataaaatggtttagtatttatttattatttatgtatatttttttatatattttaaattatttatagattattaatatttaatttaatgtaaattattcgtaaatagttgttatattatattgtttaggaaataatgataagaaaaagtttatatatttttagtatagatgtaatcgttgtaggtaggtttaattatatagtatatattagtagtaataatagtttcgatttttaggtagttaaatttatagatgtgaaatatatagatatggagggtagattattatatatttttttagataataaaaaaagagtaaatattttttaattaattttatgagataatatagtttagagaagaatttaaatatgataatgatattataaaaaagatatttattatttgaatgaattgatgaatatagttattaaaattttatttaaaatattagaaaatagaagtaagtaatatatggagaggataatgtataatgggattgaatgggatttataagagaaatgtgattttaaaaaattagagtaatttattatatgaatagaaaaaggtagaaaaatatgtagttatgttaatagatgtatgagaattatttgataaaatttaataattatttattataaaaatttaataaattagaaataaaagagaatttttttaagttaataaagttatttataaaaaagaaatatttttatttaaagttaaaattaatgagaaaaatattgaaaattatttttttgtgttggggataaaataaggatatttaatattattttttttttttttttttttttttgagatggagatttgttttgttatttaggttggattgtagtggtgcgatttcggtttattgaaaatttcgttttttaggtttaggagaatcgtttgttttagttttttgagtagttgggattatagatatgtgttattatgtttagttaatttttgtcgttttagtagagatggggttttattatgttgattaggttggttttgaatttttgattttatgatttgttcgttttggtttttcgaagtgttgggattataggcgtgagttatcgtgttcggttatttttttaaaaaattattttttattttaaggtttttaggggtgggtggtgtttggttatttgaattaattttttagtggtgatttttgagattttggtgtatttagtagttaggaaggattgagtaatagggtggggaatatttatttttttatttttttatttcgattagtttgaattgatggtagaaattgattgttgatgtttgttttatttatttatattttttatttatttattttttattaatttggtttatatgtttttagtagtcgttttattttagaagtagtgtgatttttattttttaatattagggaaatttaaagttttttttgtttttatttttgatattatattttagtttaatattattatatgaaggatttaattttttagggtagatgtttttttagagttagtttttgaattttggttttagatgtgtatttttatttttaatttttttttttttgttttgttgtgaatttgttaattattgggaattggtagggagaggtaggaagagggagagatttttttatgttgtgttaaggtattgagatagattttttttttttttttgaattttgtattttattttttttagatgtatgaaataaagtataggttagaaatgtttatttaaagagtaaaaatttatagtataaaattatgtagatatagtagatatggggtaatttataatagtgtgttaagggtgaggggattttaaggtgttaaaaaggttggttttaggtttgttaggaggaatcgttaataggatatatatttataaagtttttatgtatattataatgtgtttaaaggtatatatgtgttttggtgtatgtaattattgtatatataatatattaaaagataataaaagttaataagataataataaaataataaaaataataatatcgaatattatggtatagttgtaaatattttatagtaattaatagttgttaatttttgattataagaaataagtgttgttagttttttatttaatatatgaggaaattgaggtattaagagggaaagtgttggtgagatttgggtagggagttgaatttagtggagttagtagatttaggagttggtattagagattgaaattttagttgtatggtgttttggtggttttttgttttaattaggtgttgatttgggttttgtaggtttatgtgttttggagaaaagagagaaatagtaaatgttttattgggtgtagagtgttgttttttattttttgaggatttttttttttttagaaatttcgaaattagatttattttttttttgagggaagaattgacgtttttattttttttttttttttattttagtttttttagtttttattagtttttttttgtgatttttttaataatgatatttgttttgtgtttattatttattatgtggggaatgaaagggttttatgattaaaggataagaattagatttaggagggaattcggggtttttttttttttttaagttttattagtttagatatagtgggaaatttttttaaagagaggatggttttagtttcgtgttttattaggtttgggttgggttacgtacgcggttttttttttttttagtttttaggttttttttatttatagaggtatttgtataatagggtagattttgtatattgggtttttcgttttatttgtagtttagcgttttatttttcgagttttgagtagttagtttttaattgtagagtttattaagaagtttgggggttcggtataaaaatacgtggttgttatcgggtttgtatttgattggattttgggattttttacgtttgaggatatttaatttttttagatttttagtatttattcgggttcgtgatttgtatttgggttatttttgtttttgtttggtttatttatttttggaaatgtatttttattttagggttgttgtttgttgaggttgtaagatttttttgttttgtttttagtagggtttttatttaggttattgtttttatagtttatagggaattttttttttttttttgtggagtagggggtttttggagattttttagtttgaggttgtttttatttattttttgtattttaggattgttattgttataattattatttttaatatggatttttttggagaggaagttttaagtttgattttttatttgattgtatatgttttataatattaatattagaggaaattttattaagattatttagcggaaattgtgaatatttttattggatattaatatttaaaggagaatttttgagaaattagtatatgatttttatattttttttttggttaatgtttcgtgatttataaggtaaatttttttgtttacggggatttagaagtgataatttttttataggagatagtgtaggtgaaagtaggagcgattataaatttgtattgtttttgttgtgggtgttttttggacggggtttttttgttgtagggtaggggatgaatttttttatttgtttaggattgaggggttaatagatagtgtaattaggtttaaggatgaaaaatttttatttttattattaggtgtaaaaaagtggggaaatggtagaaagattttagttttttggatatttagttttttattggttttttgtattgtttttgtttttgtagaaatataaaattttttgtttttttttttattttttttttaaataattgattgtgggggaaattattttgattattttttattttaaatttataggaaagtgattattttgagaaaggtttagggagggtaaggtgaggttatagagtatagaataaagtttaaaaaatatggtttttgagtattgtgtttttgagggattgtgttttttagggtttggataaggaaatatttagaagtaggatgaaaatagggatgatagttgttttgataaggggttggttattattttttaaatggtttagagatatttgcgtatttttttatttatattatttgtaagggaatttagggtgtagggttatgtggtgggaatttggaaagagtatggtttcgagtgatttaggagatacgatattttcgagatagtttttggaggaggcgcgtggggagttataaagtggataaagatggttgtgtgtatttagaattttttttgttataagggggtttttaaggggttgtataggtaggttttttagtttgggttttataggttttttttttggtgtttttttgatggttggagaaataggggagggggatgtagagaggaagggattagaggtattatttttttttatatttttttttagtttttagttttttttagattatagtcgtttttattatttgttttttttgaagttattattatttaggtttttagtaattagtatatgatttttagtttattttacgttgatgtacgttggtgagtttgagagatagagggatggggatgaggatagagtaggtgttacggtcgtttttgttgtttattttttatttgtagtaagaggaggttatagatggatattcgagggttttggttcggttttggtttgggtaggatttaggggtttagatgaaattgtagtttttattttttttttaaatattttaatttttaaattttgttttaaagttttgttatttatatgtttgtttgtgtaggagttatgaggggattttattgtttagatagggttttttttatttttagttattgttttttttttttatttgggttttttgtagttgatattttttttttgtattaaaggatatagagaataataataatgataataaaaatagtagtagtcgtaatatacggaacggttgttatagattttgaagtattagggttttttttgaaaaaaagggttttgttgtatattgggtatttagagttttagttatttttgttgtgtttattttggtttgattttttttaggttagaatatttgagggtcgttttaggtttattagaggatattagggtaagtgttgtgatttttgttgtgttttatatagtaggtagttttttgtttttttttttggggaattttagtggttatttaggtttggtaggttttatttttattgggtaggatatttatagatcgatgggtattttggtttagaaaatgttttaatttgatattaggttagagagatattttggggatagaagttagaagtttagtatgtgggggtgattttgttttttgaggtttggtatttattatggtaggtattggataggaaagggtagagttagtgaggtatatggttaagtttcgttttttttaagggagatttagggaatagggttgtttttttttagtgtttttattttggttgaagtttttatggatttcggattttttgtaagtttgtttttattttggggtttaatttttttgggttggtaggaggatgggttttagattatggttttaggttttgagatttttatattgatgttgaaggggagggatgttaggattggatttttgggttatgaggttaggagggaattttttgggatgggtaggttgggaggtagagggggtagttttagttttgagggtttttttttttgtttaatatttattttagggtgaggattttgttgggagtgggttattgtttttttagattataatattggatggtttagtttttaatttattgtttttatttagtggttttaataagagaggaaagttaggatataatacgttaataggaaacgtttgtatttatagtatagagagggttttttaggatagagttggtaggggagtgattttagtgaaatgggggagaggaaagtttttgtttagggtcggtatttgtttttttgatgtttttttaggattcgagatgttattgtagtttttgtagacggtttgttattatagggtgaaagtgttttggtttgtgtggtatttttattttagaaatttttgatatttatagttaaggtttgagttttggaggattggggtattgtttatttttgagtttttaggttttgggagaggaagagttttttattatagtagaaatgtcgggagtttttggtgttgttgtttttatggattttatagattttaattttttggagggaatgtaagtttgtttttatttagtagtttatttttgaattttttatttttttatttaagtgaggaatttagtttagttgggatttttttttggtttttttttatgtttttttgtgtgggttgagtgtcggtttatttttttgttgagttttattgatttttattttttagtttatttttagttagatttagtgggaagagataggtttttgttttttgtttttaatttttttggagaaggtttttgttattatttttgtttttgtcgatttttattttttttttggtttttgatatgagttagggtttttttgaggttttgtttattttttgttaagttttcggtttttgtgttttaggttttagtttttaggattgtttttgttaattgtttatagggtttttgttttgtttttttgtttgttatagagtaggaacgattgattatttagatgttttttagcgagaaattttgattatataaatttattttgggatagtatcgtgaggttgtaatgaagattgtgggatttggggaagaagaaattatagatgaaatttttttttggaaataattttatatagatatttaatatatagatttgttgtttcgatttttttgaggaagtagaagtggttaagtgttgatagttttgtagtaatttataagttgatatggtttggttgtgtttttatttaaattatatttttagttgtaatttttataatttttatttgttatgggaggaatttagtgggaggtgattgaatttttggatgggttttttttgtattgtttttgtgatagcgaatgagttttatgagatttaatggttttaaaaaaatgggaatttttttgtacgagttttttttttttgtttgttgttatttatataagatgtgatttgtttttttttgttttttatcgtgattgtgaggtttttttagttatgtggaattattaagttcgttaaattttttttttttgtaaattgtttagttttaggtatgtttttattagtagtgtgaaaatatattaatatataagtgaaatatattatatattttaatttattaaagattagttagtagtatttattataagttgatataagagtttgtgagttttaagggaatatttattggtaatggtttgtaaataggggtagtttgattttttttatgtttttattttttttttttgttttattgttgtggttaggatttttaatattttgttgaataggagtggtgagagaaggtatttttgttttgtgttgggttttaaggggaatgttttttttatttggtatgatgttggttgtttgtttgttatagatggtttttattattttgaggtatgtttttgtaatatttagtttattgagcgtttttaatataaaggaatgttgaattttattaaaaggtttttttggatttattaagataattatgtggtttttgtttttagttttatgtatgtgatgaattatatttattgatttgtacgtgttgaattaattttgtattttggatatgaagtttatttgattattgagattagttttttgatggattgttggatttggtttgtaagtattttgttgaggattattatattaatgtttattaaatatattgatttgaagttttttttttttgttttgtttttgttaggttttggtattaggatgatgttggttttatagaatgagttggggaggagttttttttttataattttttggaatagttttagtaggaatggtattagttttttttcgtttatttggtagaatttagttgtgaatttattaggtttagggttttttttggttagtaggttatttattatagatttaattttggagtttattattggtttttttaaggaattaatttttttttgggagggtgtatgtttttaagaatttatcgattttttgtaggttttttagtttgtgtgtatataggtgtttatagtagtttttgatggttatttttatttttgtagagttagtggtaatatttgttttgttatttttaattatgtttattgggatcgtttttttttttttttttattagtttagttattagtttatttattttattaatttttttaaaaattattttttgaatttgttgatttattgaatttttttgtgttttgattttttttagaatttaatttatttttaatattttatagtttatttttagttaataatgtattagtttatataaatatagaaattttgtaattatttattttttataaaacgtttattttttatgttatagatattatatgtaatatatttatataggttataagttttattagaaagttattttattttatttttaaatagttttatgtatatgaagtaagattaaatgggggtgggggagtaagatagtttttcgtatttaatatttattattttttatattttttattttttttgataattttattttttatttggtattatttgtttttagtttgagatattttttttattaatttttatcgtatagatttgttggtgataaatttttttaattattttttatttgaaatatttttttattttgtatttattttgaaggatatttgtattggatatagaatttttagttgattttttattttttttagaattttaaagatgttattttagtttattttgtttttttggtttttgatgagaaattattggttaggaaaagagaaatagagaaagaaaaattgagtaaataatatgataaatttaaaatttattatattaataatgataaaaatttatataaattagtattttaattaagggtagagattttgtgattggattaaaaaaaataatttaattatatgttttttttaagatatgaattttattttttttaatttaatttttatttttagtttagggtatatgtgtaggtttttgtataggtaaatttgtattatgagagtttgttatatgtaggttttagttttataggatttgtgggtttttttttttgtgtgtggagatgagagagtgtagaaataaagatataagataaagagaagaaaagagagttgggtttaggggattattattattaaggtacggagattgatagtggtttcgaatgttaggttgcgttgttatttattggatataagataagggggtagggtaaggagtgtgagttatttttaatgataggtaaggttacgtgagttacgtgtttattagatagggggtttttttttgttcggtagtcgaggcggagagagagaggggatagtttatgttattattttttttatgtattttaaagattttagtatttttattaatttttgttattgttatttagaaggttgagttaggtgtagagggtggaatatgagagttaaataggagcgtgattattgaagtatagtattatagggagacgtttaggtttttagatggttgtgggcgggtttgattgatgtcgggttttttataagaggtggtggagtagaggtttttttaattttttcgggtaaagggagattttttttttcgatttgttgagtgatgggtgtttttttaggtattggcgttatcgttagattaaggagttttttagtggttttgtttaggtatgatagagggtttatatttttgttttttgtttattttttatcgtgtttttttagtttttatttttgtatggtttggttttttttaggttataattgtagaataaagattattataatattggaataaagagtaatgttataaattaatgattagtaatatttatatataattatatttatattttatgtttaatataattatttttattttaagtattttttttattatattggaagagtttgtgtttttagttttttgtttcggtatttgggtggtttgttgtttatagttatatagtttttgtatttattagtatttatttaggtattaagtttagtatttatttattattttttttgattttttttttttttttattcgttgtttttaagtaggtttcggtgtgtgttgtttttttttatatgtttatatgtttttattatttagtttttatttataagtgagaatatgtggtaattggttttttttttttgtattagttagtaaaggataatggtttttagttttatttatgtttttgtaaagtatatgatttcgtttttttttatggttgtataatgttttatggtgtatatgtgttatattttttttatttagtttattattgatgggtatttaggttgattttatgttttttttattgtgataagtgttgtaatgaatatatatttgtatgtaaaatatgtaattttaatatgaaggtatagataaataaaaattgatgaaaaaagtaatgttatataaatattaagtatagaggattgaaatggttattttattattagtaaaagatttttaaataatatgtattattagagagaaaaagaggcgttttataataataaaagggtaaaattaatagaaagatatgtaattagaaatggatttaatagtaaatttttagagtttatgaagaaaaattgataaaattatagagagaagtagagaattttataaatatggttagatattttaaagtttttttttagttataaatataaaaattaagaaaaatttagtaaagatatagaaaattgaaaagtattattaagtatttagatttaatttatttatatgtatatgtatattaatgaaaaatataaattatttgaagtatgaatgatatatttattaggagaaattatattttaggttataaaataataaatttgaagatattgaaattatatagaatatattttttggttataatggaaatatattagaaatttgtaataataagatgattttgtgggattgaatgtttttgttatttttaaatttataattgaaatttaatttttaatgtgatggtgtttggaggttgtgttattagaaagtgattatgtagtgaaggtaaaatttttattaataaaatgaatgtttttataaaagggattttagattgtttgttttttttattacgtggggatattaagaaaaggtaatatttatgaattaggaagtagtttttattatatattgattttttttaggttttgatttttgattttttagttttcggaattgtgagaaatagatttttgttgtatgtaagttatatagattatggaatttttttataattgtttagattgattaagacggacgattatgaaaatattaaggattggaaattaaatattaaaattttgaataataatttatttaaagaggaaattataggagaaattagaaagttttttgttttttgaagaatattgaagtataatatattaaatgtatgggatgtagttgaagtagtgttagatataaaaagagtttttttttaagggttaatttgtttagtattttggttttttgttttttgtttttaaggttagatttttttacgttttgtattttttgttttggtaaataaatttttcgttagtttttatttatggagattatattttatatttgttatttattttatagattaatttttttgttgtaatagtttttttcgttaagattgtattttttgttggtataattatatttttgtattttttaagttagttagttaggtttagtttagattgtgtagtttagttttagttaatggagataagatatagttatagggataagttgtattaagagattataaaaaatttttgtttttttttgtttaggtgtgtatttgttatcgttttattataagtagtattttttttgtagaagttaattgttttgttgagagattttttgttttagtgttgatttttttttataatattgagtatttgtttttaataagtagtattgaagaaaaaattgatatttttaaatgtttatattaagaaagaaggtaggttttaaattagtaaattagttttttttgtaagaagtaaagaagaataaattaaattaatgtatgtagaaggaaggaaataataataaaataaaaaattgaagtagaaagagaaaattaatgaatttaaatattggttttatagggaaaaatcgtatattttataaatttttagttagattgattaagataaaaatatatatattaataaggttagtaataaaagagagaatattagtatatattttagattttaaaaagaaatattgataattttatgttaataagtttgataagtaaatgaaatgaataatttttttgagagggaaaatttatgaaaattgatttgagaagagatagaaaatgtggttagttatatattgattgtagaaattgaatttgtaattaaaatttttttaatataggaaagtttaggtttagaaggttttattgatgaattgtattaaatatataatttagaaattatattaattttatatatattttttagaaattaaagtaggtagttttttttaatttagtttacgaagttagttatattagttcgtttttatattgttgataaatatatatttaagattgggaagaaaaagaagtttaattggatttataattttatatggttcgatggttttagaattatggtaggaggtgaatttttttttacgtagtagtggtaagagaaaatgagtaagatataaaagcggaaatttttgataaaatcgttaggttttgtgagttttatttaatattataagaatagtatgggggaaattgtttttatgatttatattattttttattgggttttttttataatatgtaagaattatgggagtataatttaagatgagatttgggtggggatatagagttaaattatattattttatttttggtttttttaaattttatgtttttatattttaaaattaattatgtttttttaataattttttaaagtttttttttattttagtattaatttagaaatttatagtttaaagttttatttgagataaggtaagttttttttatttattaatttgtaaaattaaaattaagttagttatttacgagatataatgggggtataggtattgggtaaatatagttattttaaatgggagaaattggttaaaataaaggagttatagggtttatgtaagttttaaatttagtggggtagttaaattttaaagttttaagatgattttttttgattttatgttttatatttaggttatgttgatgtaagaggtaggtttttatattttgggtagttttgtttttgtggttttgtagggtatatgtttttttttggttgtttttatagtttggcgttgagtgtttgtgatttttttagatgtatagtgtaaattgttggtggatttattattttggggtttggaatacggtggttttttttttatagttttattaggtagtgttttagtagggattttgtgtgggggttttagttttacgttttttttttatattgttttagtagaggttttttatgagggttttgtttttgtagtaaatttttgtttgggtattttagtatttttatatattttttgaaatttaggtggaggtttttaaatttttatttttgatttttgtgtatttgtaggtttaaaattatatggaagttgttaaggtttaaagtttgtattttttggagttatagattaagttgtattttggttttttttagtaatagtgggagtatttgggatgtagggtattaagtttttaggttgtatatagtatggggattttgggttttgtttatgaaattattttttttttttatgtttttgggtttgtgatgagaggggttgttatgaagatttatggtatgttttggagatatttttttttttgttttggggattaatatttggtttgttgttatttatgtaaatttttgtagttagtttgagtttttttttaaaaaatgggttttttttttttattgtattgttaggttgtaaattttttgaatttttatgttttgtttttttttgaaaatggaatgtttttaggagtatttaagttattttttgaatgttttgttgtttagaaattttatttgttagatattttatattattttaaggaaaggttagtatggggaagaagaagagagacgagaagaaaagagttttttgtttttagtgagtaaaggtcgtcgttcgagttttttagttttttatatttattgggtaataagggtaaggaggaggaggtaatgattggttagttgtttaattgattataggtttatattgttattggtaggttttaattgtggtaaattataagaaatattcgtgcggtttttaatatttatttttttttgttttaaaattaattgagtaaggtaattgtaggttgtgtagtttttaattgtcggttggtgatttagttttattttttttagtttttatttaaaatagagttgttgtggtttgaatgttttttatatattttttttttttttttttataagaggacgtttaattttaagggttgtagaaggatgaaggtttgttttttgtaatttttttatgtagaataagggcgatgatatttttgtttaattattagggttttttgtatttagggtagagaggagttgagttagaaagtattggttcgttaaatatcgattgtatttttgagttttagtaaaaggtgatattttggtattttagtagttttttagttttttgtgtggtttttttgattagtttttatgttatgggggttgatgttagtatgattttggttagtcgtcgttttattttcgtatttagatttaattggtttatggattgtattgggggaattaggtttagggttgggatttatgggtttttttagttttttattttaagatgtattttggaaaaagagataaaaattattagtatttgtggtttacgtttttttttaaaagggttttgaggattttagtatttataggggaaagagtaggtagaaggggaaaaatagttaattatgtatttattttgtgtttagtaaatttgaattttatataagttaaagtaaatatagagtagtaaaatatgtgtttgttttcgggtgggtgaagggatgatttttagttttgtttttgttttgtatttgtgaagataagttgttattttatattgttaggggaaaagttaataaaattttgttttagggtaaagatgttggggtttataaggaattatattgtgagtagattgtgagggaggttatttggggagatatgtggttttttatttttgtaggtatttgtttaggaataaaagaaaggtagtttttttatgatttagtttttaaatttaatttttttttttggtattgtgagtttggggttttaagattttattttttttttatatttagtattgtagtttattattgttatagtttaaattagcggtaattatagtttattttaatatatttggtattaagtattggttttatggaataaaatttttttattgattagggtaggcggtataggtaggcggggatgggtttcgggatgaaattgttttattttagatgattaggtattggagttttataaaggagcgtgtagtttaaatttttcgtatgtatagtttataatagggttcgtgtttttatgagaatttaatgttattattgatttgattagaggcggagtttaggcggttatgtttatgttttttcgtttattttttattttttgttgtgcggtttggtttttaataggttataaatttgtatcggtttattgtaggggagttagggatttttggtttaaattatgttattataatagaatatttgagattggataatttataatgaatataaatttaattggtttatggttgtcgaggatgggaattttaaaattaagggaatgtatttggtagaagggagaagcgtaagagagggtgagagttagagggagtaagaggtcgaatttataggtttaggttttttatgattagtattaatgagggtagttttgattagtttattaatgaaggtagagttttgatggtttaattattttttaaaggttttattttttaatattgttgtattggggattaagtttttaatagacgtttttttggggaaatatttaaataatagtagttgtaaaggataaaaatgagtaggtagatgaagtgtaggaggcgatatttggaagtattttgagtatacgattttttgtttttatggagacggggtgtattattattgttaagagataatattattttttgtttatattttttttttttgggagtttatgtaatattggattttttttattatataatttatttatttatttatttatttttagttattatttttttttttattttatttatattaaatattaatagttttggaagaaatattaagttttgttattgtgttggtttagattgaagggagtaatattgttttagtaagtgtttttcgttggtttattttagtttatagagggtagggttatgtaggtagagaattagttggttatttgattttaggtaatatagttgtatttagtgttagttttaattttgttagatgtagtgaaggtataatttatttttttaggttttgaggaatttttgtataatggttttaaaatatatttatatttttttgtttaggaataatttttgttttggtatttttatatgtattttttgttttaagattattgaattaggtatgagaaaggcgagttgaggtgaagtttagttattattttagtgtttttttgttatgggaaaaatcgtatgttaggttatattagtatttttttttgatttagtaggaaaaaagaggatattttttagtggggatatttttttttttatatttatgtttggtgtgagtttatttatgaacgtgtgtaagttcgttttttatgtttatgtttttttatttttgttttatataagtaatgtgttatttgattatttttattttttatgaaattatttttttgagtaaaatatttttttgaatattgttggatattttgggtaaatgtgttttttggtgtgaagaaatgtgatttagtgatgtaaatggttgtaatatttttcgtttaggttttattatagtgttttaagtatttgtatttgagatgaagtacggatttattttagaagtttgttagatttttttaatatggaaataaaggaaaatgttgagtttttttaagagaaattttaggtatttagttagttttgaaaagtaagtgagtgattttataagtaagtaggtaaaaatagtttaaataatagttaaggaagttagagttttaagatgtttgattttttatagaaattaaagagaatattttaatatatgtttttgagtagttttttaggaatttagatttttattaaatagagttattgatagggagattttagataaggggaaaatgaggatttaatgttgattgtgattttttgttttaaatttttttttgaggggtttggaaagagttaggtttatagagtagatttgaatatttttttttattgtttttaagtgtgtagataaagttttggttttttatttaattataaattagagaattttttaatttatttatgatttgtacgattttttattaggatattttatttttttaggttaaattagtgtgtaatttttatgtattgatttttgatgttgtttgtaattcggttttgttgaaatttatttttgttttaaaaatttttgtttgtaagttattggggaggttaggttttaagtgtgagttgttcgattttttttgtttggtgttttgtaaataaacgttttttttttttttattataaaattttagtgtggatgtttgtttttattgtattaggtgagtgggttttagtttagtttgataatatatttattattagttaagtaatgtttattttagggttagtatttatttttgttaagatttatttgttgttttttaggggtattggtattagtttaatttgttagttatttatttttaagatttttttatgagagaatttgttatatagttatatgttgtttttgtttttttttaaatagaatagtttttatgggtatttcgtgtttgtgagttggaggatgtaaaaggaatatattttgatttagtttatttttgtattgttgtagtttttagtgtttatttattttacggatttaggtgattattataagtaaacgtggatttttttgagatgtggtattgatatttttttttggatttaaaagttgtttaggtaaaattaagatttttgggtttaagagatttttttgttttagttttttttgtagttggaaatataggtatatttggaaattatttagaaataaatgtttgttgattttaattattttttaaatttggaggagggttattttgaggggtattgaattaattgaattattttgagggaatggtattaaacgatttatgagaagttatttttatgatgtaattattttttttgaggttttatttttaatattggggattatattttaatatgagatttgggtggggataatatttaatttatattagatattaatacgttttatattaatgtattttttaaattattatagtgatttttataggattgtgttttatacgggtattttttttataggttagttttttattgtttttttaattatatggttaggttattagttaatgtttataagttagtaaaaattaagatatagggatttttgttattgtttaatttttttattattttttagaaaatattatgtaatttaattaaaaaaaaaaaaaaaaaaattgttttgtttttaatttttttgattaaaggggtagatttttaaataggatgttgtttatttattttgtaaatgttgtatataaattaattagttttttgtgggttagttgattgatattgtagtttaaattttaggatgtttgttgtagagttttattttgtttagggagggttatattataaaggttaaattattttatttaaagtttagtaattattaggtttaagcgatttttttgttttagttttttgagtagttgggattataggtatttgttattacgtttagttaatttttttgtatttttagtagagatgaggttttattatgttggttaggttggttttgaatttttgattttaggtgatttgtttatttcggttttttaaagtgttgggattataggtatgagttatcgcgtttggttattttttattatataaaatataagatagtttgttttttatgtttgtgtgttttatatttgtgaatttaattatttgaggattggaaatgttatgttgttgttgttgtgtattttgtagttaggtttattgatagtggttatatttgtattgaagatgtatagatatttttttgtcgttattttttaaataatatagtataattattgtttataattatgtatattgtattaggtattgtaagtaatttagagatgatttaaagtatatgggatgatatgtataggtagtaggtatatagtaggttattttatatatgggattagagaatttatagattttggtatttataggggttttagaatttagtttaaaaggatattaagggatgattatataggattgatattttttttttaagtttttgaaagaattgatgggaggaaatgtggtaagaagtttttttggtgggaaggaatttaattaaaatttaattttttaatggatagaggattatttatattttttatttagttttttgttggttttgtttaattgtgttttttaagaatttattttattgtatttaaattttaaaaggtattgttatgaagttgtgtttaatatttttttatttttattttaataaaatttgtggttttataagttgtttttttttatagtgtttattcgtgttttttttttttgtatgattgatttttttggggattatgaaatagtttgtttatgattttttttattatttttaatatattaattataaatatattgaagaatgtttttgttcgttggttttagtatttagattatttgagtcggtttttgttgattattttatttttatttgttgtattttttttgttgtttggtatgttatatattttgggtgatgtgttatagaggttttggattttgttatttttttgttaagattgttaattgtttgacggtttattaattattataaaaattagatttattttgattttgtttaggtttgattttagtttttgttaatatgagtttagtttagtgcggtttttattttaaggtaagggtttttatttatagtgttttattattttgttggtttaatttaggtttggttgggttaaaattttaatatttttttatattttgaagtttttggtatttttatttagtatgtaatttttaagtaattgttttttggtgggttttttagagtattatttaaagtatatgtagtttaggagtgtagattttgggggttttttttttgtagtgatattgtaggtgatattgtatattatagtataatgtattaatgatatgtttgtggtgatgttggtgtaaataaatttattgtattgttaattttataaaagtttagtatatatagttatgtataatatataatttttgataatgataataaatgattatgttattggtttatatatttattatattttttattgttattttagagtgtgttttttttaattattaaaaaaatttgaaatagtttcggttaggttttttaggaggtattttagaagaaggtattgttattataggagatggtagttttatgtatattattatatttgaaaattttttagtgggataagatgtaaaggttaaagatagtgatattgttgattttaattttgtgttagtttaggttaatttatgtttttttttttaatagaaaagatttaaaagtaaaaaaaaaattaaatagaaataagtttttagaatgaaaatataaggaataatatttttgtatagttttgtaatatgttggttttttaagttaagtgttattataaaagttgaaaagttttaaaaattaaagtttataaagttaaaaaagttatattaagttaaggttaatttattattaaagaaagaaaattatttttaaaattaatttattgtagtttaagtgtatagtatttataaaatttatagtagtgtatagtaatggtttaggtttttagtttatttattatttatttgttgatttatttagagtaatttttagttttgtaagttttatttatgatgagtaatttatataggtgtgttattgtaaaaatttttttattatatttttattgtattttttttgtttatatatgtttagatttataaatatttattattgtgttataattgtttatagtatttagtatagtaatgtgttatttaagtttgtagtttaggagtaataagttttatgatatagcgtaggtgtgtagtaggttatattatttagttttgtgtatggatattttatgatgtttacgtaagattaaattatttaaggatatattttttagaatttattttattattaagaaagaatgattatatatgtaatgtaagttttttgaagtttaagtatttttatttttatatatttgttttatttaagaaatattttttattttagtaggtatagttaaaaaaaaagaaaaaagaaaaaaagaaaaatttttttgtttaaatgttttaaggttatttttttaataatattggtagtagttttatttttttatatttgtttttatcgtttatataattttttgtttattttaaggtgtagagatataatttaattatagggtgtttagtaaaatattaatgttgggaaagggtttaggagataacggtgaattaaaatatagtataaaggttaggtattgtggtttatttttgtaattttagtattttgggaggttaaggagggtgaattatttgagtttagaggttttagattagtttgggaaatatattgagatttcgtttttataaatatatgttaattaatgtagtataatagagaatttggaaataaatttatatatttatagttaattgatttttgataaaggtgttaagaatatatatttggggaaaggatattttttttaataaatggtgttggggaaattggatatttatatgtagaagaatggaattagatttttatattttattttatataaatattaatttaagatggattaaatatttagacgtaagatttaaaattataaaataattggaagtaaatatatgagaaatattttaggatattggtttgggtaacgattttatggttaagattttagaagtatagataatttaaataaaatagataaatgggattataataaattaaaacgtttttgcgtagtaaagaaaattattaaaagagtagatagataatttgttgaatgggagaaaatatttttaaataatttatttgataagggattaatatttagaatatgtaaggaatttaagagttaaaaaaattaaaaaattttattaaaaagtggataaacgatatgaatagatattttttaaaagaagatatataaatggttagtaggtatatgaaaaatgtttaatattatttattattagggaaatgtaagttaaaattataatgagatattattttatttttagatagaatgggtataattaaaaagataaaaaaaaataaataaataaatagatgtttgtgaggatgtggagaaaagggtatttttatatatagtgtgtaaaattagtgtagtaattgtaaaaaatagtatagagagtttttaaaatattgaaaatagaattattgtattattaagtaattttggggtggggttgtagggttttggagtttaggttggtagagagtagggtttggaggtgtttgggaggtcggaggagaaggaaagaggtagatgtttgggttttagggtatcgaagtggggagggtttggggtaagaggtaaatgggcgaatttttgagatttattgagaatttatggttagtttttgagatttaaagaaaggggttagaagtttgggttaggtttatcgttgagttttttgtaatttttttgtaatttatgattatttttagatttttagttaagtaagtttttgattttttaagaataatatttttttggttgttagtagagggatttgttttttgtttatgattttagggtttttgggtttggtatggtagtttttgttgttaaaggtaaagaagaggtagtcgtttagttagtttagtgttatgattgtaggttttttgggggtggattttgatagggttttaagattttagtttagaaagcgggattttgaaatttttagggttgggttttttagtatttgtatagtagtttttttttttttagaattttagaaatttttttttattttatatatatttgtacgtatatatattaatataaatatatatatttttaataggatgttttttattttttttttttttttggttttttttattttttttttttttttttgttttttttttttatgatttatttttttttttttttgttttttggaggtttttttttttttggatcgaggtattaggagttgttgtttttggattttagggttggaggttaataggttgatttttgagatgagtagtttttagtagtaggaataaaggaggggacgggaggttaaggttttatttggaggttgagggattgggttttgtggtagtaaggatttgggggtgtgttatttttatatttgattttattgttttgttttggaggtttttttttgttttgaggtaaaagtttagttatttagtggtgagaggaaatgttattgttaatatggattttgggaagttgaatggatttagagtttgatttgagattcggaggttttttgagtgtagagttttgtttaggtgttgggagtagagggagagtttcggaggttttggttggtgagaaaggggagcggggttcggttttttgttttcgtttttgtggttatacgggggcgtcgtcgcgttgttttcgtattttgattgagcgtttttaggtattgggtgagggttgagtggggtagaaggggcggagtttgaggttatttacgcgggaatggaggttttttttaagtagttttggaatttatagatttaggttagatttgtttgttttgtaacgtgaggtaattgtggagtagtaagatttggttttagaatttttatcgcgaatgcggtttttatagaatttaatttgaatgagaggttagggtttgagttgattgttttgggtatatttggttttgatggggttgttaaaatgtaattggtatttatagaaattttaatgattgtcgaaaagtttatataattatatataattttatttttgatgtttttggttgtgtttttgaaagggtataaagagttatggaaagaggttgaaaggtttttttgggaatttttaaatttttttttatagtagtaatttggtttagtttagtgttatgattgtaggttttttggggttggattttgatagggttttaaggttttaattaagaaaatgggattttggaatttttagggttgggttttgaagaaatatagggagaaggatttggaggcgtaatttttttttttgattagtacgggtagggttgtttgagcgcgttttttttttgtgtttagtaggatcgattttgtagtgaggcgtagtttttgtttttttgggggttttaggtttatatatttttttattgtcgtatgttagaagtatttgttttttttattttgttttttatagattttttttttttttttgtttttgattattaatataatataggtaagattttataagattaggtaaaagatgttattgataatagtgaaggtatggttgtgaagggataatggtagatatagatagagttagagataaaatagaaaggtagaatagagatagaaatatatatagaaaatgaatatttattcgtttatttaattatttatttatttatgtatttatttatgtatgtatttgtttgttttttatttttttatttttttataagggaggtatattaatatttttatatttattttttaataaaaattataagattttttttgtcggtttatatttgtttttttttatttagttaattgatgtgtttgttgaggttttgttatatgttatattgggtgttgagttttggggtttgaatagtaatagatttttgtgatgtatttatacggggttttttattgttttgtttttggttatgagatatttttatgtttttgaagtttttttttttgttttttggataaagtttttgattatttttttattggtatttaggagattttgatattttggaatattagtattttttattaaatattgatttatagtatttattttgtgtttgttatttattatatatttttttgatgatttttttattgagagattgttaaaaaaggatgtgattgtaattttagataagtgtaatagaatagtaaaataaggaattttgtgaaaagggttttttttgtttttttttagaatattttatttgtatttgtgtttggttggatgaaaagtggtttttatattttttgatataatgtaataagtagaaatatttgtttagtaaataagtatttcggaaaatgtagggttttgaatattgtttttagggttttatatattagaaggatatatatattttttttttaattttagagatgtttaggggttgtatgttggttttttattggttttatttatgttttattggaagaggacggtgtttttttggaaatgttagagtggtgtgggatagttagtttttttgtgtgttttgtaggaaaataaataatttagttttttaattttatttagtatttgaaaataaattgggtttttaatgtatttttttttagagagtaaattgcggaggaaatatgtttaaacgtatatttaattatttttcgagttaagaatgtaagtatgaggttttttaagacgagttaagagaagtttttgattttaaattttatgtggaagttataagatggagttggaagtatttgtttttatttttgggtataaagttgggatttcgcgggaggtagttagttatagttagggtattaagtaaatttttaggaaggattcggtttacgtaggagtttttttaagtagtttttttttgaagaaaatttgaagttttagaaatttaagaagaataaagatatttatgtttttgataaggaaaatgaaatgttagtaatttagtattgagaagggaagttacgagattatattttttgtacgtggagaagatatgtttaatggagaggtgggaatttgttttaaaagtgttgcgttgtcgtgagaacgtgtggttattattgttattattcgttgttcgtttagtggtttttgtttattgtaattaatgggttaatgaatagaaatattttttattttttttttttgtaataaggttattaaaataaattattttttttggttgattttttatttagggaaaaaataattggggtaatgtatgttcgtagattaggttttaaagaagtttttagaaaattttgagatagtttttagaaggtttatttagtagaaacgaggttttgtatttttgttatttcgtgtgttattatgatggagtttgtttagttagggatggtaagaggttaagttattataggtgatttgtaggtttggtgaggaaggataatgatagacgggaaggaggaaatgtatatatacgattagattttttgttatttttttgtttattggttttgttttgttttttattttttgaaattttgttgttatgagttttggtgtgggtttgtttttattttttgtattgagaattttgttgtagttatttatattatatatttttgttagtagtttttaaaatatttttttgaattatttttaattattttttatggttattggaatttatattatgagattgttggaattttttaattgatagtataatatttttaaagttttattatgtttggtattacgtttttattttgtattattttgtagtatataatttttattttagtttattttttaaattttttattttaatgattatattttaaaattttagagttttttttagttttttgtatgaaattgtttataaatttgtttaaattttataattgttgtttttttatattttttatatataattggtaatagtggtagggatttattaggtttttttgtaatttgtttttatgatattataaattttttttttacgtttattagtaattttataattttggggtaatttttgttaaatatttattttttttataatattgaaaattttttatttttaagattttatttttgttttttattatatttttaagtgtttagtagattttttgattattggaaatatattttggatgaacggatttttgcgtgaatttggtagttaagttattgttttttttgtttttttgagttttgagttagtggttttttgtttatagaatattttgggatattaaaatagtttatttgtgtaaggtgtagatgaagagagaattaatggaagataagttaataaggtttttgagagaaaatttttagggtttaattttagttttattattttttttatttttttttttttttgtttgtataaaggattatatattgagttttttatgggtttgtattgaggattaaatttgattttttatgtaaagttatggtattattttttgagttatattaaatgttttattattgataattattattattatatttattataatttttgggttatttttattattttgtttttataaattataatttaaggaatatttttatatatgtggtttttttgtttttgttttgggatagagtttcgatttgttatttaggttgaagtgtagtgatatgatcgtagtttattgtaatttttatttttcgggtttaagtaatttttttgttttagtttttcgagtagtcggaattataggtgtttgttattacgttcggttaatttttgtagtttttagtagagacggggttttattatgttggttaggttgattttgaatttttgatttcgtaatttatttgtttcggttttttaaagtgttgggattataggtatgagttatcgcgttcggtttatatatgcgtttttagaaagatatgtaattatttttttgggataaatttttaaaagagaaatttttatgttaaaatgttagaatatttaggttcggcgtaattttttatttttgtaattttagtattttgggagattaaggcgggtggattatttgaggttaaggatttgagatgagtttggttattatggtgaaattttatttttattaaaattataaaaattagttgggcgtggtggtacgtatttgtagttttagttacgcgggaggttgaggtaggagaatcgtttgaatttaggaggtggaggttttaataagttaagattgtgttattgtattttagtttgggcgatagagtaagattttgttttaaaaacgttagaatatttaaattattgagatattttgtaaaagtgttttttagaagttttgtattattttttaatgttattagttttcgtaatagtatattttttttgtattttgattaatattattattatttatttttgtttttgttaagttgatggattttaattttggtttttattttgtagtttatatttttattttttgtatatatttattattaatataattatatgatattttttaattattttttaaacgtaatgttgatatttttaaatattgaatttaattaagaaaaagtagtttttaatatttgggaatttgtttggtatagttgggtattaatgttgttaggagttggtttggtttttattattgggttatattagtttttttgggatataaattatattataaaatattaatattatattggattatttttagtttatgagaaagtgaggcgaaataaaagtattttataattttgtttaaattttttttcggttagtatgagtggttgatgtttttttacggattgagttttatttgtattttagtttattttttttaaaggtaagatttattgaaatatcgaattgtagaattgtttttgtttattgatagtatttaatttagagtaataaaataaaatagaattttttaattgtgttatttgtattttttttttttttttatttttatgttttggtatttgagtttttattgattgtgaggattttttttttaagattagtttatttttatagatattaaagggattgatcgtaaatgcgttttttttatgtaaattaattaaattagagtttaaatttagaatgagttttttttttttggttgttatatggtttcgatatttttagttaatatttttttgttttaataatttgagagataggtattagataattagagataatttttatgttttagagttattaagattatttagatttattaatattgaatatgtttatattgtttattttgttttgtttatttatttttttaaaaattatattagaggttttcgtttatgtttttttttttcgttgttatttgattagttttggtgttgtttgttgtgttgtgttttttatgttagtgggtaataaattttttttttagtggtatagatttttttgtgttattatttagttataattattaattaattaaattttagggaaatttgaaatattagttgaagtttaaatattataataggttttatttaaaaggtatttattaagatattcggtagttatttaaggtgtgtatttttttttttattgtagtgagtaataaatttaatttttttatttatagatgtgttttaggtggttttgggttgaagggtattaatatattgttattattttgtttattaattgtttatatgtttttgaggttgattatgggaaagtgtttgtatatttttgtgtttgtggatgttaaagagattttttttaatttgtaagtagttaaaatgattattattattttttattattttttatattttggttatgtttagaatatttgtattttagagttgtgaaaattttatatatatttgatttaggaagagacgatgaggaaaggggttcgagagttgaaggatatagaattgttttaagttgtggaaaagtaaagattattaatgcgatgggattgtaaggtttaattattttataatttttgaaatgtgtttattgggtttgtagggtatttaatatatgtggtatttaataaatataatttaggatgagtatttaagatttatttgtttttttatatttattaaagtaaagaaaatattatgttagatttttagtgaaatatagatatggattggtaatagtgatgtgtatttatgaagatttgatattatgaattgataatttatattttggttgatgtttatatattgtagttgtttaaatatatattaattaaatttttttgggtatgttatattttaatgatatgtttgagatttatatagataaatttatggtttttatatgaagataattttgatatatttaatttatgagtgatatggtatatttttagggagattaaaaattaagatattttggtatgtattattaaattttattggagatgtggttatttgagttgtggtggttatatttgcgatgaagcggaagaagagttttggtatgtaaggattgggatttgtattgttatgttttattttgtattgataataaaatgtattttatatatttcgttttttattatatatatagatatatatatataaaatataaatatttatgtttatttagttatagtttttgtttgttgaaatttttgtaacgtaaagtatttgtgaaaataaaggattagttattattttgatgattttagagatggggattcgatttttagaagttataggttagaagggaaagattgttgaggatagatttttagttatttaagagggaaggtggtttagtttttgtacgttttttgtttttgtttttttgattttgttttgggtatggttatagagtcgaatagataaattgaattttattaaattaaaatttttatgtattagagaatattattaatatagtgaaaaggtaatttatataatggtagaaaatatttgtttattatatattttatatgggttaagtgtttggatatataaagaattttttaaatattaataataaaatgataaataattttattataaaatgggtaaagaaattgaaaagttatttttttaaagaagatatataaatcgttaatatatataggaaaagatatttaatattattagttattaaagaaatgtaaattaaattataataatatggttataataataatttttttaaaatgaaaataaatgttaggaaagataagtagaaattagaatttttatattattatattttatggaaatataaaatggttagttgaggtttttatttggtggaagtattttttttttgggaaatttattaagtttaaggttgtagagatgtgaagtagaaattttaaaagtaattaataggtgtaattgtataagaatatttattaatataataaattattttagtttttttagttaaaataatttttataattttgtttatttttttagaaattatttaaattgtattgattatgataatatgtttgtagttttagttatttaagagattgagatgggaggatattttgagtttaggagtttaagattaattcggataatatagtaaaatttgttttgaaaaaaaatgaaaaattagttgtatatggtagtgtatgattgtagttttagttatcggggggttgaggtggatggattttttgagtttagaagttagaagttaatatggggtaatatagaaagattttttttttaaaatttttaaaaaataaattgtatgagttattttagattttttatgtttttatataaatttgtaaattagtttataaatttttattaaaaagttttttagaattttgttagtttttttttaaatttttgggttaatttggggagtgttgtattttaataatgttaaattttgttttttatgaataggggatttatttatttaggttttttatgtattttttttatagtgttttttgatttttagtgttttggattttagagattttaaatattttttgtatgatttatttattttttttgttgttgttgtttttgttgttgtttgttttatgaagttttattttattttaatagttttttggggtataggtgggttttggtttaatggatgagttttttagtggtgaattttgagattttagtgtatttgttatttaagtaatatatattgtatttaatatgtagttttttattttattttttttttagtttgttttttgagtttttaaagtttattatatcgttttatatgtttttgtatttttttagtttagtttttatttataagtgagaatatatagtatttggttttttatttttgagttattttatttagaataatggtttttatttttatttaggttgttgtaaaatatattattttgttttttgttatggttaagtaatattttatggtgtatatatattatattttttttgtttatttgttggtcgatggatatttattttgtttttatgttattgtaatcgtgaagtgtgttgttgtaaatatgtacgtgtatgtgtcgtttttatataatgattttttttgggtagatatttagtagtgggattgttggattgaatggtagatttatttgtagttttttaaataatgtttatattgttttttaaagtggttttattaatttatatttttattagtagtgtaaaagtgttttttttttattatatttatataaatatttattgtggtttttaaaaattttttaattatggtaatttttgtaggagtaaggtggtattttgtatttataatttgtatttttttgatgattagttattttgagtaattttttatgattgttggttatttgtatatttttttttgagaattgttaatttatgttttttgtttagtttttgatgggattatttgttttttttttgttgatttttttgcgttttttgtagattttggatattagttttttgttggatgtatagtttgtgaatatttttttttattgtgtgggttgtttgtttattttgttgattattttttttgttgtgtagaagttttattatttaattaggttttatttatttatttttatttttgttgtgtttgttttcggggttttagttatgaattttttgtttaagttaatgtttagaagagttttttaatgttattatgttattttttaagatttttatggttttaggttttaggttttaggtttaagtttttgatttattttgagttgatatttatataaagtgagagatggagatatagttttattttatatgtggtttgttagtttttttagtattttttattgaataggatgtgttttttttaatttatgtttttgtatgttttgttaaagattagttagttgttggtatttggttttatttttggattgtttattttattttattggtttaagcgtttattttttattttattttattttgagatggagttttatttttgttgtttagattggattgtaatggtacgattttagtttattgtaatttttgttttttaggtttaagtgatttttttgttttagttttttaaatagttgggattataggtgtttattattacgtttagataattttttttgtatttttagtagagatggtgttttattatgttggttaggttagtttcgaatttttgattttaggtgatttgtttgtttttatttttcgaagtgttgggattataggcgtgagttatcgtgtttagttgaagtgtttattttatattagtatgatgttgttttggtaacgatagtttcgtagtgtaatttgaagtttgttaatgggtcgtttttagatttgttatttttgtttagtattgttttggatacgtgggtttttttttggttttatatgaattttggggttgtttgttttagttttgtgaagaatgatgatggtattttgatgaaaattgtattgaatttatagattgttttgggtagtatggttatttttataatattgattttatttatttatgagtatgggatgtgtttttatgtgtttgtgttatttatgattttttttagtagtgttttttagttttttttgtagagattttttatttttttggttaagtatatttttaggttttggggggtgttgtttttttggaggtttttgttgttgttgttgttgtttgtttttgtagttgttgtaaaagggattgagtttttgatttgatttttatttggtcgttgttggtgtatagtaatgtttttgatttgtgtatattgattttgtgatttgagattttattaaatttgtttattagatttatgggttttttggatgagttttagtattttttaggtatacgattatattattagtgaatagggatagtttgatttttttttttttaatttggatgtttattattttttttttttgtttgattgttttggttagaatttgtaatattgtgttgaatagaagtggtgtacgtgggtatttttgttttgttttagtttttggaggaatgtttttaatttttttttatttattatgatgttggttgtgagtttgttatatatgatttttatgattttgaggtaagttttttttatgtttattttgttgaaggtttttattataaagtaatgttagattttattaaatgttttttttgtatttattgagataattatatgattgttgtttttaattttgtttatgtggtgtattatatttattgatttgtatatgttaaattatttttgtatttttgggatgaaatttattttaatatggtgtattatttttttgataggttattggatttggttagttagtattgtgttgaatatttttgtatgtatgtttattggggatattggtttgtattttttttttttgttatgtttttttttatttttggtattagggtgatattgtttttatagaatgatttagggaggattttttttttttttattttttggaatagttttagtaggattggtattaattttttgaatgtttaatggaatttgtttgggaatttatttggttttaggtttttttttgttgatagttttttttattattgttttagttttattgtttgttattggtttgtttatgatttttatttttttttgatttagtttaggagggttgtatgtttttaggaatttattagtttttagattttttagttggtgtgtgtaaaggtgtttatagtagttttgaattaatttttgtgtttttgtggtattagttgtaatatttttagtttgttttttaattgagtttatttggatttttttttttttttttggttaattttattaatggtttattgattttgtttatttttttaaagatttaattttttttttatttattttttgtattatttttgttttagttttatttatttttgttttgatttttattattttttttttatgttggttttgggttttatttgtttttatttttttagttttttgaggtgtgatattaggtttttaatttgtgtttatttagatttttttttttttttttagatgaagttttattttgttgtttaggttggagtgtagtggcgtaattttagtttattgtaatttcgattttttggatttaagtgattttttttttttagttttttgagtagttgggattaaaggcgcgtgttattacgtttagttaatttttgtatttttagtagagataaggttttattatgttggttaggttggttttaaatttttgattttaattgatttatttgttttagttttttaaagtgttgggattataggtataagttattgtgttcgggtttttttaggtttttttaagttagtatttattgttatgaatttttttatttttattgttttggttatattttagagattttgattatttgtgatattattattatttattttagagaatttttaaatttttattttgattttattgttaattgaaaaattatttaagaataggttatttaatttttatgtatttatatagtttttaagttttattttggagttgatttttagttttattttattttggtttgtgaagatattttataggattttagtttttttaaatttgtttagatttgtgttgaggtttattatatggtttattttggagaatgttttatgtgttgatgagaagaatgtatattttatagttattgggaagaaatgttttgtaaatatttgttaagtttatttgttgtaggatatggtttaagattattgtttttttgttgattttgtgttttgatgatttgtttagagttattagtggagtattgatgttttttgttattattgttttgttgtttattttattttttaagtttagtagtaattgttttataaagttgggagttttattgttaggtgtatataaatttaggattgtgatatttttttgttggaattattattttattattatataatgtttttttttgtttttttttttttttttattgttgttgttttaaagtttgtttttgttttgtataagaatagttatttttgtttttttttaagaaaatgtagtgtatatatattatggaatattatgtggttataaaaaagaatgagtttttgttttttgcggaatatggatggagttggaggttattatttttagtaaattaatgcgggaaaagaaaatcgaatattatatgtttttatttataagtgggagttaaatgatgagaatatatggatatatagaagggaattgtatatattggggtttattagagagtggaggttgggaggagggagaggattaggaaaagtaattaataggtattaggtttaatgtttaggtaataaaataatttgtatagtaaattttatgatataagtttatttatataataaatttgtatatgtatgtttgaatttaaaatataagttaaattaataaaaaattattttaaaatgatcggcggttttatttgtttaaaggttgtgttgggagttttttggttttattaggtattggtattttgtattatattatatgtagtagggttagcgatatatttttaggttagttaaggttatggttattttatttatgattttttatgtgggtatttagttttgatgagtgttttatatttataagttaaaattttttattaaatttgggaattttttagttatagatttttttgaattttttttttgattttgtgtttatttttttttgggattttaattggttatttgtttatttgttttatattttttgagggtttgtgaagttttttttatttttttttaattttattttatttttttttatttttagattagataatttttgttgatttatatttaaggatattgattgattttttattttgttattttaaaatttttgttgattttatttagagtattgttattatttttttatttagtttgagaatttttatttagtattatttatagtttttatttttttgttgtaattatttttatttattttttagaaatgatattttttttatttttttttatatattttttaaaattgttttaaagagtttgttgataattttaatatttggatttattgaaatttatttatttttaattttttttttattatagttatatattttttttttttttttttatgtttgattttatttgataaagtggatattatatgttttgttttagagagtttggaatttataataatttttttaaagatggtaatttttttattattattatttttgttttttagtgaacgtggttaattttttttgtattggtaattgtgaaatttgttatttttgtagttggttatagttgatgtttttgttttgtttatcgatatttagttgttgtatttttagtagggggttttgggtgtttattttgtatttttgtaatatttgtttttgttaaattttatgttgaaatgtaatttttaatgttgtaggtggggtttagtggaagttgtttgggttatgggggtagattttttatgaatggtttggtgttttttttatagttataagtaagtttttttcgttttattattattattattattattattattttgagatagagtttcgttttgttgtttagtttggagagtagtggtgcgattttggtttattgtaatttttattttttgggtttaagtgatttttttgttttagttttttgagtagttgggattataggtatatgttattatgttaagttaatttttgtatttttagtaaggatggggttttattatattggttaggttggtttcgaatttttgatttcgtgatttattcgtttcggttttttaaagtgttgggattataggtatgagttattatattcggtttttgttttattattttgaaagagagttggttgtttagaagaatttggttttttttattttgttttttttttgttatgtgatatgtttggttttttttttttttttattaggagtaaaaggtttttgaggttttattagaagttgaagagatgttggtgttatgtttgtataatttatatagttatgagttaaataaattttttttttttataaattatttatttttaggtatttatagtaatataatatggattaataagtattggggttatttttgttaagattttgtaatttagtttttttgtgtttgttttgtttttggaattttttttaaattgttttgtattttgtttttttattttttagtttagtaagatttttgtttttttttgtttgtgttgtatgtaggttgataaatgtaagtagtttatgttattgtagatttttagatattgttaggattattttatttttttaagggtagattttattttaggttttttttgatttttttttaggtttttttgagtgttttatatttatggggagtttagtgtttaattagggatgtgagtatagtttgtatttagattttgaatttgaattttttagtagattttttttaaaattgtttgattgatgtaaatatgtaaaaatgtaaatatttttagtttatttgggtttttaattttataaattgttttattgatttattagggttgtagttatttgttgggagtttggagtaaatttataggtaaggaggaaaggttattaatttgtagtttttatttaatagatagttttaagattaaagtattattatatttttgttcgtttttgtttgttttttagtgattttaaatatttatttttatgattttgtttagtttttatattgttatttagaggaagatttgttgatttatttgtttatgttgttattattagaagttttgttttaaaagagatttttgggagaaaatgttatagtttataatttaattttgtgagataaataaggatttagatattagagattttttgtttaggttttttaaattgaagtaagttgaggttttttgtttgtaattttaaatttttaaaagaatcgttgattttatatgatttttaatgataaagaaggatattttatatagattggatttattattatttaagatagtatattttatatttaggaaatttttgattttgtaaattaagttattaatgttgtagttaaatttgagtggaggttaaggaagtagtttagttaagtgtgaaataagtattgttttttttttttatttttttttaaaattatgtaattatatgtgtttttatttaattttatagttgattggaagttgttggaaatgagatttttttattatttaggttttgggttttttaatttaaggaatttttttaagattggagtataagttttttgaaaaataattgtatcggtgttattaaacgttaatgaagataaataattttaataaagaaaaaatgtgattttttattttgtgaggggatttttttgtattaaaattcggtaagttagtataagtttaaaatattttataagaaatggaaatgttattttgatttaggtaggtattaaatatatttgttatttggtttaaatgtttttttggatatgtgtgtgtgtgtgtgtgtgtgtgtgcgtgtgtgtgtgtgtgtgcgtgtgtgtgtgtgtgtgtgtgtgtgtgtgtgtgaaataggtataggagtttattgtttaagttttagggtttcgaagaaaagttttattttttatttttttattaaataatagtttttggtttgttattgagttttggtagattttgaatgttatgattatgatatagtaaatgattaagtgatttgagatgtttattatgatttggattttatttatttatttatggttattagtatttagtgagtatttaggaggaagtggatatatatattgtatatatatatagtattagatttgagttggtttttagtaaggttagttaagttgttttataatatgtattatatttttagtatttttattattattggtaaatttatttttttttgttttatttttggggttttgaggagttttttaaggattgttgattatagaagaagaaatttgaatatgttttgaatatttaaaagtgtattttgtagtattatagttttttttaggaattgttataaagaagagtggaaaggaaagtatttttagtaggaagatttttaattagattatttggaagtttattttgtttaaagaaatattttattgttagatttttattaatgtatgggtagtgattaatagtttgtttaggtatttaatgattttaaaggaataagatgggaaggtttgtgataaggagttttaaggataaggtgtgaattattaatgtggtatattaggtatttacgtttatttttatgttaataaaaaatgggttattaaaagataaaatatattataaaagtattgagaggtttttatattagtgaaaattgtttaataaatattaggaagttttgaatttatttttattttgagtttatttgtttaatgtagataagttaagttttagtttttatggttttataaggaatttggaataggaggtaagttttaagtagtatttaaagtgggaaattttttaggatgattttttttattttgttgggatttttaagtttagtttttcggtgtaagagaaatgttttatgtttaaaggattgtaggaatagttgttttggtgttgagtggaattgggagtaaatataatggttttatatatgtatttgtagtttaagtttttattatttggattgtttggtaattattaagttgtgaatttagtttatagtgggttaggttttaaggaatttgttaaaaaataaacgtaaataatacgtaaaataaatataaattttttttggaggaagatgttattaattatatttaaaattttttaaaattattttataagtaaaatgagtatttattaggaaaataataataaaattatttataagatataagttattatgaaagattaagtagaaatattatatagtagaataataagaataagatataaaatagttttgttttttgtgattaaaaaataggttttaaaagatttttagttaattagaaattataaataatgtttaggaaaaattgaaaagataaatataaaatatttagaaatgaaatatatgataatataaaaattaagttttaatggattttttttaagtaaagataatttgatataaatacgtttttattgaagggagttttaaagaatatgttttaggtaaaaggcgaaattttggttggaagatataagataaaagaaaatataaatataaaataaaaattaaaaatgaaagtaaatgtgtggttaaatttaaattaaggtgaggttaaaaaggatagtatatgagttttgagggaatatatagttagttaaaatttatatttatttttttttgtttatataataatgttggattttttttttttatattttgatttaaaattttaagataaatttttaaattatagtgttgtttaatttgattttgttttgtatattttagtatagggtatataaagggaatattttgtgggtttttttatgttatttttttaaggattgttgaatttttgtaagtgatgtatgtataaagttatatgtagagtttttattagtgtagttttttatagtaagattgttatttgtaaaggtggtgggatttgttagtttgttttttagaattatggatagttttatacgttttgggatgtagggagttagatttttttttatttggatattatgatatattagggagaaaagtttaaaaagaattttaatagttatgaaattgtgattttaaatatagttagtaattatagttttaaatattgtattttttttttttttttttttgtttttaatattttattagttatgtattttatggttattgttatagaaggatttgtttgagtagaagatacgattttaggttagttttggtatgatattatagtggttgaagagtaatagatttagaataaaattgtttggaattgaattttggttttaaatttttataattgtgttattttgggtaagttatttaaattttttgaatttaatttttttgagtaagttatttatattttgtagattttttgattttttttttttttttttttttttttttttttttttttttttttttttttttttttttttttttttttttttttttttttttttttttttttttttgagatagagttttgttttttttgtttagattggagtgtaatggtgtaattttagtttattataatttttgtttttcgggtttaagtgtttttttcgttttagttttttaagtagttggaattataggtattcgttattaagtttagttaattttgtatttttagtagagataggattttattatgttagttaggtttgtttcgaatttttgattttaggtgattcgttttttttggttttttaaagtgttgggattataggtgtgagttataatatttagtttaaattttatttttttattgtggataagaatattttttttatatggttgtgataaatattgaataaaataatttatgtaggtatttaagttaatgtttggaatatagtaagtgttttttaaatgtagttattattattattatagttgttgttatcgttattttttatgtaatatattgaggatttttttttttataggtttttatgaaggttttttaaggatttgttgaatgagtaagatttgttaagattatgaaaattttttaggtatagttttattaaaattttttagaagtttttaatattttatttatagattttttttgatgttagaatattagttttggttaggggtattttttggagtttgagtgtagtttggtgttttgggaaaagaattattttaataatagtaaggtttaataatgttaaaattgagagttttaaaatgtttaatttgaagtaagggtagagtagatatttttttaatgggaagaggagaatgtattaattgtaagatagttaaagaaatatgtgtttgtttattgttagtgttaataatagtgtttttattagttaaatgttttatgtggtatatttttttgaataaatatttttaaaggttttcgtaaaaaaggatttttggttaatattattttttaagttaaatgggaagaattaattaagtagaggatgtattaattagtttatgaaaagtttaagttttatgttttatagaattaagtttaataatgagaagaaatcggatatagaatttaatatatattttgaatatagaaggtgatattttagttttataggtttttgagaacgttttatattttgttttgatgagatgtggtgagtatatatttgatgtattaggtatttttgtaaaagtattttatagatgtttttttataggtattttgagattatttttaagaaagataagttataaatttatttttagaaggttaagtttaaaatttagtggtataagtaagtaaatattttaaagaaatattggttatattttgttattttgtggaaagattggataattgtaatggggtagttttaatttttgttttgaaaggaatttttagaatttattatatttagatatgtttattttaaaatgaaatgaaaaataagtaatttaaattttgtgatattttttattaatattttttaatatatatttttgttatttgttattttaaaatatgatttttatttttatatatattttattgtaattatattatatataatatttatggtgttttatatatataaatatatttgatttttataattttgtatagttgttagagaagaatttattattttgtttttttttttattaataaataaataaggtttaaaaatattttataaaattttaaaggtgagagttgtgagtttttgggtatattaattttttgattttttaaattgttttttttttttttttttaaaaatatgggggaaaaattagattgatggtatttttttattttaataattaattgattgaatagaaagatagattgagataatgtagtggatagtttaatattagaattttaaaattttattttgttatttcgatgtagtggttttttaaatatatataagaatatgaaaaatatgtttggggaaattgaattatagtatttaatgtaatttttttaattagtaagttgttaatatttgttaaataaatgtatatacgaaggttaaaatttggaagggatggaaggaagtataagtaagaatataaatataaatttttatttattagataaaatgataaaaggtttataagtgaggggagattagtggggttaagaatgtagaggaatgtttgggaaaattgttagaatatggtgtttgattttttatagaagagaggatgagaagtaaggtagttcgtagattaattgattgaggaaagtagaaattaggaggatttggagtgtggtatggtggatattaattttagatttattgattagttgtttataattttttaagaatttttaagagtgaagtgttttgttttcggagattgattttgtaggtttaggagagggttagaaatagttatttataaaaggtttttcgtgggatttggtatgattgtattttagattttagagtgtaatatttaggttaatttagggattataaaaaggaggattttatttatagaatgttttagagaggttgagagggtaataagattaagtaaagtttattttgttgtaattagaggtggttgttgatatttgagaattgataagaagtttagaatgagtaaaggcgtagaaacggatagagtgatggataattagggggtaatgaggagattggtttggtaagagtatgtttttaaaatgggaggggttttggagttgtagggttagaggtggttaaatgagaggtttggtatttataagtgagtttgataaattaaatatttgaataagattgaggtatgaaaagagttatgatgtgtttagtggttaaatgattaaagttaagatgtttttaatttaatttgattgagttagatggaagatttggtaattagatatgaagggaatggagataagttttttatttattttttttagatgatattttttatttgtttgtaagcgtttttgggttggagtataagggtggttttagggatagagaaatttagaggtagagagggaatttttaagattaggaaagtaagcgtggttgggtttagagaagttgagttttaaatgtagttattgattttatatatagaagtaatgggattgttagttagttagtttgtttagttagttagttagattattagattaattattattatgtagtgttgtgggaaattagaaaattttgggatggttgtaaggatatgtgtgtaaagatgtttgtgtagtggatatttagtgtagtgataattaaaggaaattatttgaatatttatattagagaagtagttgtatgtaaaatattatggaattagggtttaaaatgatgagtttaagttttttttatgaaattggtgagatgtttataatataaataaaaaatattaagtaatagggtattataaatagaatagttgaattttttgttataatgaataagaaaataaaataaagtttatttgaattgaaaagaaagaagtaaaattattttcgttatagatgatatgattttatatatagaaatttaaaagaatttattttaaaaaagtattataattaaagaattttattatattggtaggatataaaattaaaatataaaaattaattgtgtttttatatagtattaatgaatgaaaaatgaaaaatgaaaattttgaaattatatataaaaagtagtttaaaatgtattaaagatttaagtgaaagagttaatattagaaaatttttagaaggaaataggttaggtacgatggtttatgtttgtaattttagtattttgggaggttaaagtgggtagattgtttgagtttaggagttggtagattaaattgggtagtatggtaaaattttgtttttataaaaaatataaaatttagtcgggtgtggtggtatgtatttgtagttttatttatttaggaggttgaggtgggagaattatttgagtttgaggaagttgaggttgtaatgaatcgtgattgtattattgtattttagtttgggtgatagagtgagattgtgttttaaggaaaaaaaaggaaagaaagtaaggaaggaaggaaggaaagaaggaaggaagggagggaggaaggaagggaggaagagaggaagaagaaaaaagaaagaaagaaagaaaataaaatataggtataaatttttatggttttggattaagtaaaggtatttaattttaaatgtgatattaaaagtataagtaaaaaaagaagaaaaagataaattggacgttatcgtatttaaaaatttttgtatgtttatagatgttattaagaaagtgaaaaaaaaaattttatagaatgggagaaaatttttgtaaattatatatatggtaaaagagaaaattttgtttataatatataaaatcggttataatttaatagtaaaaaggtaaataattaaatttaaaaataaaggatttggatttatagttttttagtgaaaatatataaaaggttaataagtacgtggaaatatgtttaatattattaattattaggaaaatgtaaatcggttttataatgcgatagtattttatattgtgagataaagtagtaaatgttagaagttgatttttatttgttagtataattttataaagtttttgtgagagttgtatatttttttagtttatcgtgaggatgtgtaattttttggaaagatgttttgaggataaaataggataaagtatatagtttttaacgttttttgtttaagttattatattttttaaaagatgaatgtttttgtttttttttgtatataagataatgtttgacgggtatagtgattatgtttttgtaatttatattggacgtatttttgtttttaaattttgatgtgattttgttttaatgtaattttttattaagtgtgatgtgatgttgtaatatagaatatttataatataagtagtgggttgaaatattgagttggtatagtttgatagagtttttttaaagggttgtttttgggttgtaggttttcgtttatagtttttagtaagatttttaaataaaattaagttaattttttaaagtttgatttttttttttagttgtaattatttattagaatggttataataaaaagataataatgaatatcgatgaggatgtagagaaattggaagttttatatattgttggtgggaatataaagaggtgaagtttttttagaaaataggttagtatttttttaaaatgttaaatattaagttagtatatgatttagttatttttttttaggtatatagtatatttaagagaaataaaaatatttgtttatataaatatttatacgtaaatgtttacggttgtattattaataatagtataaaatagaaagaatttaaatgtttattaattaataaatgaataggtaaattgtgatatatttatataatgaaatattatttagtaataaaaaagacgtgaagtattgttatatgttataatttagacgaattatgaaaatgttacggtaagtgaaagaagttagatacgaaaggttatatatcgtataattttttttacgtgaaatttttagaataggtaaatttgtagatatggaatataggttagtggttgtttagggttaggggagttgagaggaaatgaggagtggttgttaatgggtatggggttttttgtggggtgatgaaaatgttttggaattgataatgataatgttggtataattatgtgaatatattaaaaattattgatttgtatataatgaatgtgtgaattttatgatatgtaaattatattttaagttgttgtaaaatgattaaattataaataaaatttgaggatttttgttaaaaaaaagttataaagtaaaaatatttaatatttaatataggtgtttatgtttgtatgaaaatggagaaagtagatatatagagagtagattgataatataaattattttagtaaagtgggtatagatttagagatagaagatattttaaaatatatttatatatattgtgatgattttatttttaattttgagtatgtattatttgtatattaaaattttaaaaatagaaagttaagaattttgaaaattttttagttaaataaaaaatagtaataaataaatagtaataaagagttatttggaatttttttttggagaattggtttaagtatatataaggtaaaaagaggataatggttgaagaattaaggtaggattatagtagtaggtgagaagaaaatgtaagcgcggagttataagataaggtagagagaagatgatagagttaagaagtggatatgaattttataaaatatttttggagatttagaaatgattgggtttatgtaggagagaaattgtagtttagagtttaagacggttagatattagggatagggtatggaattagaagtgttttttagttatttttttttgtttttttttattattttcgtaaagtcgttgtttaaattatagttattgtattttgagatggtggtattatttggagattttaagataatagaaaggtaggtcgggcgcggtggtttacgtttgtaattttagtattttgggaagtcgaggtaggcggtttacgaggttaggagatggagattattttggttaatacggtgaaattttatttttattaaaaatataaaaaaaaaaaaaaaaaattagttaggtatggtggcgggcgtttgtagttttagttatttgggaggttgaggtaggagaatggagtgaatttaggaggtggagtttgtagtgagtcgagatcgcgtcgttgtattttagtttgggtaatagagcgatattttttttaaaaaaaaaaaaaaaaaaaaaaaaagataatagaaaggtaatttttgagtttttttgaggtaaggaagtgtattagtgtagttttttttaggaaaattattatattttagtataatattttaggaataacgtgtttaatataggaattagagtttatattaatgttggaaaatttaggagagtaaatattggtgaagttatgttgtaggtaaaataaaggttttttaagatgtttatgttttaatttttggaatttgtgaaaatgttatttaatatgataaaaggaagtttttagatgtgattaagttgaggtttatgagatgggaagattattttgtattatttaggtaggtttaatataattataatggtcgttataagtgaaaaaggtagtagtagagtgagaattggagagggagatgtgataatagaattagaggttaaagtgatgggattgttgattttagaagatggaggaaggaattacgagttaaagaatgtaggtagttttaagaagtggagaaggtgaggaaatagatttttttttagagtcgttataggaatgtagttttgatgattttttattttaggttagagagatttatattagatttttgatttttagaattgtaagataataaatttgagttgttttaagttattttatagtagtaatttgttatagtagaaatagaatattaatattagttattattgtagtttttggaggttgtagttgggaggttagggaagtatgtgttgaagaatttagtttgaagtataggtgggaggtttttagaattttgttgggagattgtagttattttttagaatttttgagaaagtttttattatttatttcggtttgtataggtaaagtagatgggtttttggtttagtatagaagttattgagaatttgatatttgtttatttttttgtttgtagttacgattgatgggtagaggtttgtttttttattttttttgggtattatattttatgtaagtttttttgattggaaaatgtgaatcggaattatatagggaaggggattttgggagatatattttttgtttttcggtagagaaggtggttgttgatttgataagatataattttgtatattagttaatgatggtaagtgtagatgggtttgttgatttttgattgataaagtaaagattttatagttgatgtaaattagtgatgtgtttaagagatttgtttaaatttagtaaatattaagtgtgatgtgttatggattatgaaaagagtaaatttatggtttgtgttatttattttagtattattgaagaaggattttagaagtttattgatttagttagatttttatgtttttttaatttttattttaagtttaggggttcgtgtgtaggtttgttatataggtaaatttgtattatggggatttattgtatatattattttattatttaagtattaagtttagtatttattagttattttttttaatttttgttttttttttagtttttaataggttttagtttttgttgtttttttttttgtgtttatgtgttataatttaatttttatttataagtgagaatatgtggtatttggttttttatttttgttttagttttttaaggataatgatttttagttttatttatgtttttgtaaaggatatgatgttgtttttttttatggttgtataatattttatgatgtatatgtattatattttttttatttagtttattattggtaggtatttaggttgattttacgtttttgttgttgtgaatagtgttgtaatgaatatatatatgtatatgtttttataatagaatgatttttatttttttgggtatatatttagtaatgggattgttgggttgaatggtatttttgtttttaggtttttgaggaattgttatattgtattttataatggttaaattaatttatatttttattaatagtgtataagcgttttttttttttagtaatttggttagtatttgttattttttgattttttaataataattattatgattggtgtgagatggtattttattgtggttttgatttgtatttttaataattaatgatgagttttttttatatgattgttggttgtatgtatttttttttttgagaagtgtttgtttattttttttgtttatttgttaatggggttgttttttgtaaatttttttaagttttttatagatgttggatattagatttttgttagatgtatagtttgtaaaattttttttttattgggtaggttgtttatttattttgttgttagttttttttgttgtgtagaagttttttagattaattagattttatttgttaatttttgtttttgttgttattgtttttggtgtttttattatgaaatttttttttatttttatgttttgaatggtattgtttatgttgttttttagagtttttatagttttgggttttatatttaagtttttaatttattttgagttaatttttgtatatggtgtaaggaagggggtttcgttttaatttttgtatatgattagttagttattttagtattatttattgaataaggaattttttttttattgtttgtttttgttaagtttgttaaatataaaatagttgtaggtgtgtagttttatttttgagttttttttttgttttattggtttatgtgtttgtttatgtattaatattatgttgttttggttattgtagtattgtagtatagtttgaagttagatagtataatgtttttagttttgttttttttgtttaggatggttttagttatttttggttttatatgaattttagaatagttttttttttttttttttatttgtttatttattattattattttagatggagttttgttgtgttattaggttggagtgtagtgatatgatttgggtttattgtaaattttattttttaggtttaagtaatttttatgttttagttttttaagtagttgagattataggtatgtgttattatatttgggtaattttatttttattttttgtatttttagtagagattgggttttattatgttggttaggttggtttcgaatttttgattttaagtgatttgttcgtttcggttttttaaagtgttgggattatagatatgagttattaagtttgattttaaaatagtttttttttagaattatatatttaaattggaaaagatgtgttgtattttttgaattttagtggtttataggagttgtttagaatagtttgattatagtaatttttagttaagttagaagtttgaaatgagtttaaagtgtagggataaaattttagtgagaggtagaaaattggaaagttaatgtttttttatgttaattaattaagtttataaattgtttatatgtgtagtttttttttttaatttgaataattttttagagatgagtattattgtgaagtgtggggtggttatgaaagtataagattgtttttagtaatttatatagttatttatggatgttcggtttaagattttgatagttacggttttattttaagggaaaagaggttatttgaggagtaaatagaattttattataagatgagtgtaggaaatattttaaatatagtttttaaggtcgatgtagaaatagcgtaagaagaaagtgtttagatatttagaattttatgaggtagggatttagaatttttaaaggttatttttttatatttgttaataggttaaggtttttgtggatgtgtgtggttgtggttgatagggattttagtgatttttatgaggttagacgtagtttaagagagaataaggggtacgtatatgtatatatatatatatatacgtatatatatacgtatatatatatagagttaagggtagttttttaaagttttttattatttttttttgtttatattttattttttattagtttattttttatttttttttttttaagtaataataaattagttatatgatgttggttggtgtggtgatttatatttgtaattttagtattttggaaggtagaggtatggaaatggtttaagttcgagagtttgatagttgtgtgattttagatagagttttttatttttttgtgtttttatttttttatttattttatgtgaattattattttaataaatagggattaaacgtagattgtttgagggaaaagtaagtaagttagtgtagttgtttttattgattttggtgtttagtaggggagatggatattttttttagtgttatatttaatgttatatattttaaaagtaaattttttttaaatttgtatgtgttgttttttgaatttttattatggagagatatttttagtgtgtattgttattgtaagaatttttattttttatttatttaataaatatagtttgaaggtttagaatatgttagtttttgtgtttttttttgaaaatagaatagtgaggagtataaatataggtatttatgttttgaagttatagtgtagtgagaaagaaatatatgagttagatgaatagaagttattataaaaagtgttttgagaaggaaggaaaggatttgtgagaaaagaaaggagaaagagtaaagttagttttaggaaagtaggttaaatttttaataggaatttaagtataaaaaaaaaaaaaaaaaagtaggaattaggtagatttaagtaaagggaatatttagttcgattaaaaaatgaaaggttttgtagtatgtttgtgaaattgtaagtagaattattggttagtgtaagaggagagagagagaaaattggaaaagtgtgtaaggttttgtttatatagggttgggaaaattggttaagaatttgggtgttattttgaggttaatagtgagttattaaaatattttaagtaagaaagaaataaaagtggatttttgttttagtaggatttttgtaattgtagggtattgatttaagttttgtttgggttagagtaagattggaggtaataaaatgagttgggagattttgaagaattttgaataatagaaagagtgataagatttagggttgtggagattacgttgggatttaggaggataggtattagagatggtgtagttataaaggttcgggggtagggtcgggaaagtttgaagtttttatttgtggagtagaggagaggtttaatatttgtatattttagtgaaggggtagaatgggagtgaataagggagtttttgggttgggattttttatgtttttggtattaggacggggtgggtaatatagtgtggagtttagagtagagtagaattgtaggttgttatttaataagatgtgtagtagttaaaggttgtgggagttatgtaggggaaggtaaatttaaagtagttagaagatgtataagataataatttttggtttagaatttttgtatatttgtaggtatttggtttattttgtaattgatttgttattgggaatttgttagtttttttatttttttttcgtgattttttttatgatttggttttttggtttttttgttgaattttttttttatgtatagttgttggatgacgttttttggtgtttttataattgtttattaatgtgtggtgtttttttatttttaggttagaagggtttaaatatgaaaaaaattttgaagagattaggttttttttttttattttttttttttaggaaagtaggaggagatgagatattttaaaattttggaggtataattattgggatatgtgatgtgattttagaaatttgagagaaaggaaggggttttaggacggggtgtgtgtgtgtgtgtgtgtgtgtgatattagagagtttgggataggattatgttttttgtgtagaaatagttgaaaatttggagttgagaatttttattgaaggttttagaaatattttgagaagaataggaaaatgggaagagataattatagtgattggtaagtgaaggataaatagttaggagatatttttttaggtttttataatttattttataaaattattgataatgtattaatgatagatttaaaaatatttatttaattttttttagagatagtgatagattgtgataatataatgtttagagagatttggatttaattataatttaattttaattgtgattgtgattatagagagtttggaagtagtttgtattggattatatatattgatttataatttagttttatgttggtttttatagtttttattatagttgttattgtgttttttaatattgaagggtatgttttggttaggtttttttggtattgaataggtattggttatttttgggttttttttatttgtttgttattttttggtttttttgagttattgataattatgttttgtagatgttattttgtggagtttaagattaaaagatattgtgaagattataaaagggaaaaggttagtattttgggagggtgaggagggtggattaggaggttaggagatcgagattattttggttagtatggtgaaatttcgtttttattaaaaatataaaattagatgggttatttaggaggttgaggtagaagaattatttgaatttgggaggtagaggttgtagtgagttaagattatgttattgtattttagtttggtaatagagtaagattttgtataaaaaaaaaaaaaaaaagagagagagagtgagagaaagaagtttatgtcgtttggattagttttatttagtagtgtaagggaaagatgtcgtgttgattaaatgtgttgttgattttttgaattttgagtgaggatggatttataatggagttatagtggattttttttaatatttaaatttatagagaaaatgattttataattagtgattttagtaaacgtagattttgggaagttatggttttttatatattattatttttttgtagtaattttatatttggttttattaagaggaatttttgtgggttaggtgtttttggaaagatgtttgtgtattttagaggatgggaaatttattttaaagtatattttaaagttttgattttataaggtttttaagtattgtcggtttttaaatattgttagttgatatatagaaatttagatattagatttagttttattttttggatataatatgataattgttaaaatttttttcgtttttaataatgatgtataaaatgatgatatattaaagtaaagttttgagtaattttgagagaattttaggggtatattttattttgttgaatatgtagtttgatattgagggattaatgttgagtgtcgtttaagaaagtttggtggggatttattcgtttttttagtgagtaatgtttttttagttgaatgtgattagtttttttatgtagaaattagagaatattatttaatttttggtttttataataattattgagtattattagtattgggggtgatattgataggtttttataggataagtattgttgttttaagtaagggtttgtagtggaagggatgtagagttttagtagtaggaatttgaaatttgaaattttattattaggtatagtatataatttgttattttatgagaagtttaatttaattattgatttataattgtgatatatttttaattaaagtttaaagggaaatgaaggttttattataggtttaatatagtttataaatattagttataaagatttagatttattttagggattgtttttggtttggcgggattgaagatggggatgtattggagttttgtagagaataatatgattttttgttattttgaaggaaatagaagttttatattaggtattatagaatttgattttgtttatatatattgtaggtttttgaaggagaaagtttttatcggtataaattttaaaagttagtttttaggaataaatagttttgtttattattgtgaaatttttgaattaaaaagtaaatttataatgtttaataataatataagtgggtagtaggatttttggaagttttggaatattgtagtatagcgatgtttttgtttttttaaaataaagttatttaatttgtataatgttttataaatatttaaaataatataaaattatattttgagttttgtattgttttgttaatatatggtgatgtagatagaacgtaatttatatttttagatataaataattgattttgaatttaaggaatttgtttgaattaagtatttttttggtatttaatgagttttttgtaaataggtattaatttttaaatttgagatatataattttgttttataattatttaattaattgttttttaaatattagattgtgatagttgtattagttttttgtggttgttgtaataaattgttataaatttgatggtttaaaataatagaaatttatttttttataattttggaggttaggagttttaaattaagattttagtagggttatgttttttttagaggatttaggggagaattagttttttgtatttgttatattttggtggttgtaggtattttttggtttgtggttgtattattttaatttttgtttttgtttttatattattttttattttgtgtgtttgtgaattttaaattttttatgggtattgggtttaatatttgggtgatgaaataatttgtataataaatttttgtgatataggtttatttatgtaataaatttttaacgtgtatttttaaatttaaaataaaagtttttaaaaattttttttttttgttttttataaaaatatatgttattgtatttagggtttatttagatattttaggttagtttatttttttaatatttttaaattaattatattttttgttatataaagtaatatttatttttttgttatataaagtaatagttatatgttttaaggatttgatatggatatttttggaagggttgttttttagattattaaagtagtatattagttttttatggttgttataataaattattataaatttggtgatttaatataaaatatatgtatttatttatcgtttttgaaattagtaaattaaaataattttgagtggattttagtttatttaaaattatttttagtggattaaaattaagatgttagatgggttggttttttttgtaggttttaggggagaatttattttttaattttgtttagtttttaaggttgtttatgttatttggtttgtaagttttttttttatttttaaaatgaattattttagttttttttggtattattatattttttttttttttgattttgatattttttgttttttttgataaggattattgtgattatattgggtttatttagtaaatttaagataattttttttaagatttttaattatatttataaagtttttttttttaaataaggtaatatttatagtttttggggattaggatgagattagggacgattaacgagattatttaggtagtaatttgtgagtaaaattattatagagaggtaaattatttatattttatatttgtagagtaatgttgtttattgtgattttggtatgtatttttagtaattaaaatgttttaaggatttatattatatattgatggtttttgatttttttgtatttaagattatgtatatttggggttgtgttttttagaaatatatatagtaatagtatttgagtagaatttagaaatattgtattattatgagaaagtatatttcgttaatttaatatatattatgatttatatttggtttataagttgatatgtttttttagatttttttagttgtttttttttttttttttttaagtcggtgttttatttggattgggttaatttgtttttttaggattagaagaaatattatgttgtaaggtatggtatagaaatataattgattgttatatattgattttgtattttgtaattttgttgaatttgtttattagtgttttttttttttttttttttgtgtgtgtgtgtgtgtgtgtgtgtgtgtgtgtgtaatttttagggttttttgtatatatgattatgttgttttttaataaagataattttatttttttttttttattttgggtgttttattttattttttttgtttagttattttggttagaatttttaatattaagttgaatagatgtggtgaataggtatatttgttttgtttttgatggtagagaaaaagttttttttattttttttttttgaatatgatgttagtgatgggttgtttatatatcgtttttattgtgttgaggtagtttttttttatttttaggttgttgaatgtttttattagaaagggtgttgaattttgttaaatgtttttttgtgttaatcgagatgattatgtggattatgaaagttttgaagtaggagagagatagatgatatttttttttataaagatttttttggttgtaggtagtttttggaggagaataagattgaaggtaaagaaatgtgttgggaaattttggtagaaattttagggataggtaatgatgatttgagttggggaagtggttatatattacgattcgtattttagataagagtagaagtttgagatggagtagttttataggtttaggtgggagagaaggttgaattagagattagaagcgtgttgagttgagtattaagttcgttgttgtaggttagttagaggtttagagggaaaggagttgtgggtttttcggtttggggtattgttacgtaaattaggtttgcggggattaagttttaagtattcgtgtatttggaaggagcgatagtagatggggagcgttgagcgaggatagggatgtgtagtttgtagagagaataggagtcgttttcggtcggttagagggttgtagtgtagtgttaaaggagggattttggaagagtaaagttgagatttgtagtgaaagtgatagtagaagaatttgaggaaaaatatatttttttgttttttcgattgtatttggttttttttttttagtattggagtttatttttttttttttttttttttggttttttttttaattggattatgttttttttttattgaaatatttttttattgtgatattgtaaatttttaataaatcgttaatattgttttttgagtttttagagtgttttattttttttagatatgttggtgattatttatttgttttatttgttttttttttgagttatggttttaggtggaagtggttagtttttttatatagaatttagatatatattatttaatttatggtttatagtaaatttttagagtttagtagtagtagttgttgggtaggaggttttcgttaatatttagtattagtagtttttattagagttttattgtattatataaaggatatggagtgagaagagtaaataatgttttgtaataggtaattgaaattttatagattatttataatgtgtagttttgttttataaaagttacgatgaattgaaagtagagaattttgaatttggggtatagttgtagaatttcgatatttttttagttttgatatattttagtggattttattgtttttagttataggagtttttaagtttattttagggtttatttttggttagagattaggtgggagtgaggggtggattgggaagtagtgaaggttttatagggtgacgtatttaagtatgtaattgttaaaagtataagttttttattaggtattatagaaatagtttttttagttagtgttgtagatttttgttagatagggtgaatttatattatttataaaatttacgagttagttttgtatattgggtcgttgaattttgaagtaaattgggaagttttaaaagtaataggaattggggttatttagtaattaagatatagtaatttatttttggaaaaaaagtattttttataatagtttttaaattattaaaacgtttgttaaattttgagttttgatatattttttgtttaaagtgaatataataaattttaaattgaaatgtagtaagtggggtttttgttttgttgtgtggtgagaagaaatgttgttttattcgaggtggttgttttaacgacgtattttttttttgtattaatttaaaaaaaattataaataaattttaaattttatatgaggataaatagggttttttttatagttttttagtttgtttttaaatataatattttaagtatgtaatttatcggagtaaaatttattagaataatttattagaagttatttgtttagttttatatttgtttagtaatgttgtatattgggatattggaatattttttgtgtaagtaaaaattttttatatttatacgtgtatcgatagtttttattttatttgtgtattatatagcgtgtgtttttttgattttgttttgtagaaaaatatattttaatagaatatttttagttgattttatagttttttatagtatttttgaaaaatattattttgtaaacgtgttgttttagtattgtttttgaaaatagtcgaaaattttaatttagttattttttttttaatttttttaatttttttaattatattgaaaattcgtattgtattatgttttagtatttttagatttatttagtgtttgttgaaggaggtttgtattttgttgggaagacgtatttggtaaggtttttttttttttttaggagatcggttaagatgtagtttgatttgtagttcggtattattgtttttacggaaagtgttacgtaagttttatttttttttatggtttatatatatgtagaattgcgttgagtgtattagttattttttttatatggataataaataaattttaaattgtaaaagataaaggttgagattggaatggcgtttgatgagttttggtatattttgtgggggcggttaattttggggattttaggatacgtagtattaaggatcgttttaatcgatagaggggcgtttagtcgtcgggggcgggcggaaaggaaggtatagcggagtggaatcgcgtagcgtacgttataagtattaggattttattttattggggtagcgcgtggggtttcgacgggagggatgcggggttagcgtttttgtttagataacgcgacgcggggattttggggagataggtttgtgataattcgattttggattatattttatggcggatttggtaggtaatttcggtgaaggggggagttttttaaagaaggaatgtaggagttgcgttttttaaagaaggaatggaggagcggtaggaatatagaggaaggcggaggggcgaggaggaggtttttttttggggttttatttggtaggttgattggttttttttgggttatagttttttttagcgttttttatgcgttgggatttttgtttttttttataggttagtaagggtttttttttatttttaatatttgtggaaaatttttattattggatttatttttttttataatttggattttagtttttttaataacgttttaataatattttaagagttaaggaggaaagattttgtgtttagttggttattttgaaggtagaggcgtttgttatggtttttttttttttttttttttttgagaaagggtttcgttttgtcgtttaggttgtggtgtagtggcgttatttcggtttattgtaatttttgtttttcgggtttaagcgatttttttattttagttttttaggtaattgggattataggtatgcgttattacgttcggttgatttttgtgtttttagtagagacggggttttattatgttggttaggttagtttcgaatttttgattttaagtgattcggtttttttggttttttaaagtgttgggattataggtataaattatcgtattcggttatttatagttttttagtaggagtatatttaaggggtagtttttgtataataataggagaattgaagttttaaagttagataagttgtgcgagagttttaattagttcgttgtttagttatgagattttagatacgttatgtaaattatttaagtattaattaatttatgtataaaatggatgtaattatgttattatttatattggggttttaggaaggatcgatgtaataaagggagggttttattaataattttttttttattttattaattattgttaatttttgttgttttttaggtgttttaaaattaaatttatgtttttggtagttatttgtggagtaaatattatgtgttaggtaatgtttaagtgttgagaaaaatataaggtataaaatatatagttataaaatatagttattagatagagtttttgttttttaggaatttatagttgtaaagaggagataataaatgtaatgattttgtagtgtgataagagttaatatagtaatttatgtaggtgttgtgggtattataggggaggaagtttgtttggagtattaggtttagaggatttgtgtagagtagggatttttaattttagcgttatagtgagtatttgatgttttaggttatataattttttattgtggaggttgttttgtaaattgtaggatgtttagtaatatttttagtttttatttattagatgtttgtaatattaatatttttttgattgtgataatattaaaatatatttagatattgttatatgttttgagggaagggggtttatttgagaattgatgtgtagaagatagttgagatattatttagagttggattttttagaggtatttttatttggtagaatgatagattagttttttttatttttaaagacgggattttattttgttgtttaggttggagtgtagtggcgagattatagtttattgtaatttggaatttttgggtttaagcgatttttttgttttagttttttaagtagttgggattatgtatgttattaggttcggttgattttttttttaatttttatagagatagcgttttaatatgttgtttagattggttttaaatttttggttttaagcgatttttttgttttagttttttaaagtgttaggattatagatatatatggtttaagttagtttttaatttagttttttgtttatattaatatataattggtttttttgttattttaatgtattagaaaaatattagttttaaattgaaagtagagatataatttttttttttaaatatatttgggtaaaagtgatattgtagaaaatagtgaatgaaagaagataaaaataatagtatttaattatatataagttttgataattttgtaattattatgttattttattttttattgtaaatttagttttttgttgtatttgtttggattaggatttggagagtgtagagtttggggtagggtgtaggtagagtagtttaaggtaaattttttttttagggtagggttttttatttttgtttagaaatatttagtattttaaagagaatgtttttttttttttttttaggttttgatttttttttggttttaggtaaaggattttaagattgaggaatttttataagttttttttaggttgtattgtttttgagttttgaagtaaaattacgtttgatgtttaagaatataggaggtgagagtgaagggaagaggtgggtgtagttgtttttattagagagttggcggtgttaaaagtttgagttggggagttcgttgttatttttgtttaggagttttttgttttaggagttttaatttttttaaaatatgattggtttatttattgtatacgtttttagtttatttgtttttgatttatatttttgtttaggttttttttgaagtatagtaaggataatttgggttagagaagttaagttttatttgttttaggaaatgaaaaaatagatatattaggatgggttaatttatttgttaagtagagatgggatcgtttgggatataatatttataaattatatttgtgtagtttttgatttttttttttttatattaggttggaataagattataaaattttttaatttttttataaaggtgttttttatttattggagtttgattatttgaaagagttatttttgtatatatttatataaattattattagggttttataatagaaatatatatatatatatatatatagaaatcgttatttattaggtgattaaaatttaaagatttgatgatgttttattgtgttggtgaaggtaaggtaattagatattattttgtgttttgttttgtatggggagtaaattgatgtaatttttgtgaaaggtaattggtattttttattaaaatttaattgtaaaagtatttgatttggtaatttaatttttagaaatttattatgtggataaagatttaggtgtaaaataaaatgtgagtaaaaagtttaagtatagtattttttttattttattttaaagtcgtttttatcgtgaataataatatgatataaatgtaaaaaagtatagttaaatgaagtatatatgtaatgtatttattattttatttgagaaattaaacgttgttggtagtttaggtgtttttattttagtaattatatttttttttaattggttattattttgaatttttaggcgatgtttttttgttttatttttaaagtttttttatttaagaagaaattattaaataataaattatatgtttgtatgtatatttatattttattgtttttgaatagtatataaatggaattatataatatgtgtttttttgtatttggagttttgttgaatagtatgttttttttggtttgattttttttttttttttttttgttttgagatagttcgtttttgttgtttaggttggagagtaatggcgtgatttcggtttattgtaatttttgtttttcgggtttaagcgatttttttgttttagttttttgagtagttaggattataggtatgtgttattaagttaggttaattttgtatttttagtagagatggggtttttttatgttagttaggtgggtttcgaatttttgattttaggtgatttattagttttagttttttaaagtgttgggattataggcgtgaggtattatatttagttattgaatagtatgttttgaagatttatttatgttggatgtatagttatatttaagttttatatattgtttatgggtagaatatttgaaagaaggtaaatatttaatagggagtagattaaataaattatggtatatttatataatagaatattatgtagtgatgaaaaataatgaagttgatgttagatattaaaatggtaagagtattaagtttttttgttaaataaaaagtagtatatgatttatagaatagtattttattatttgtatgaaagaaaaatttaaattaatattaatttgtttatatatatttataaaaatatttagaatatttttatcgtatttttttttggaagataaaatgggtagttggaaaattaatttttttatttatttgtatattttttgaattttttgttatttgtatgtattatttattgaaaatgaggttagagagtgaaataaaatattgtttagtcgtatagttggttaatgttagagtttggatttagtttgttttagttatagggattttaggttagatttttttttataattgtaaagttaagaaggaatgaattaataattagttttatattttataatttgggaaagtttaaaagtatattttaattgagtttgaatgttggtttgtttattttttttatagtttttttttaagagatagttttaattttatagttttggttaaattttattgggttgaaacgggtaattttagaatgatttattataaagtaggatatatttttaaatgataggttttggttaggatggtataataagtttatgtttaggtaaagattttttgttttaaattatatggtaataagaaaaatgtaaaaagagaaaagttatagttgagttaaggataagagaaatattattttttatgaagaatgggttattaatagaaagtaaaggtagtgggaagggttgatgtttttagtatgttgtttgttaggagattggttgaaggtaggtttttttttgaaagaaattgttattgattattgtttgtagttgaggttttataagaagttttaggtttaggtagatgggaggatttaagtgtagtttggagaggaggtatttattgaagttttagagaattagtagattattttatataatttgtagaaattaatttaaaatgtattaaaggtataaatgtattaggtaaaattttaaaagaatttttttttattataagaaaataaataaataaataaataaaataattaaaattttaggttttagttagttatggttgttataataaatattatagattgggtggtttatataatagatatttattttttatagttttggaggtgatagtagatttagttttagtgaggattttttttttggtatatagatgattgttttttttcggtgtttttataaggtagggaaagagagttttaatttttttttttttaaaagagtattaattttattacggaggttttttttttttgattttatttaaatttaattatttttttagggttttatttttagatattattatattgggggttagggttttaatatatgaattttgggggaatataaatatttagtttataatattttttaaagtaaaaagaaaagaatattatgaaatttagtggaaaaatagggggaaatatttgaataggtagtttaaagaaagagaaaaatgaatgatgatgatttatttgaagttatatagtattattggtaataagagaaatttaagttataataagaaagggaaagagttgatattgattagattgtgataaagattaagaagttagttaaaattaattgagtatgtaaagaaagatgaatttggtatattgttagggagtatagattgtggaagttgaaggaaaatttgattttttttaggtaatttttatatatataaatttagaatttaatttgtaattgtggttaagtattttagaggtttatttttataggtttatggtttagaattttattatagagatatatatggtaatatatagttggaagtaaattagttgattatttataagaaaagggataaataaaatgttttaaaagtataatttatggtagtttaaaatattgaattagatgtatatatagtatagagagtttaaaaaacgttgttagtcgggtgcggtggtttacgtttgtaattttagtattttgggaggtcgaggcgggtggattacgaggttaggagatcgagtttattttggttaatacggtgaaatttcgtttttattaaaaatataaaaaattagtcgggtatggtggcgggtgtttgtagttttagttatttaggaggttgaggtaggagaatggtattaatttgggaggcggagtttgtagtgagttaagatcgcgttattgtattttagtttgggtaagagtgagattttgttttaaaaaaaaaaaaaaaaaaaaaagttgttaaaaagataaaatggtttttgtaagttttatgttttaggtatagttttttttattttgttgttagattaatgtgatttttttagggtggaagtttagggtttagtattttagggtggtattatagttagagatggggttatagtgggtgttggtggggaatgtttttgggggttcgaagaaaagggttagaggaaatttagaatatttattttttttttataggttatttaatagggtttattgatcgttttaagaaggaaaggattttaggaagagaaatttagatatttatatttattttaagagtttagggggaatatttttttgttttaaagtagagtgaggtaggatatagttggaggtattaggtttgaaaggaggtgagggggttttaattaagtagtgttaaggttatagtgggtagggttagggttagaataagttttaaaaagaattaggatggaggtagaagataaggtttgagagagatagtttggtttttgaggaagtagttgtaagattatgaaaattaaaagtttttatatattaaaatatattattaagagagtgaaaagataatttacggaatgaaagaaaatgtttgtaaattatatatttgataagggtttagtatttagaatatataaagaatttttaaaatttaaaatataaaggtaatttattttttttaaatgggtaaaggttttgaaaggatttttttttaaagaaaatatataaatagttaataaatatataagatgtttaatattattatttattagagaattgtatattaaaattataaagaggttttgtggtttttgtttagtgttttggattgatttttagcggttttatatttattagaatgttattataggatggttataataaataataaaataaattgaaagtaagtgtagattaggatggagagaaattagaattatgtgtattgttggtgggagtgtaaaatggtgtagtagttatgaagagtagtttggtagttttttaaaaagttaaaatataaaattattaaacgaatcgtatttatattttttaataaaaaaattaaaaatagatattgaaatagaattttgtatataaatgtttatagtagtattgtttataatagttaaaaagtagaaataacggaagtgtttattgatggttgaatggataaataaaatgtggtatatttatataatcggttattatttagttatagaaaggaatgaaatattgatatttgttatagtacggatgaattttgaaaatattatgttaagtgaaagaaattagatataataagttataaattgtatgattttatttatatgaaatatatagaatagataaattcgtaaaggtagaaatagattagtggttgttaagggttggaatagggaaaaattggaagtgattgtttaatggaaataggtttttgtttgggatgatgaaaaagatttggaattaaatagtggtggtgattgtataatattgtaaatgtatttaatgttattgaattgtatattttaaaatggttaaaatgatatattttaagttaagtatattttattataataaaaagaggaattattggggggtattgggtgaggatgtaggggatattttagtatgttttttgtagtttttagtgaatttatattttaaaatagttttgaaaatttattaagtagttattaagtataggtattatttttatagtgatataattgttttaaattagagatatatattgatttattatggtgataataatttagattttttaatgtttaagatttgttttttttaacgtttttgttatttgaatttaaaataatagttttttaattttttttttttttgttttttgataataacgatattggtttttattagttttgaaagtgttaaatgaatttaatgtttagggagtgattaaggtatagtttttatggttattggaagattttattttttgattcgatttgaataatttaagtttttttttttttttttaattttatttagagttttaaaagggtataaattttgagttattgaatttttagaaatatttgagaaagttattgtattttagggatttagtttatttttattttttatttaggaaatttatttttgtatataatatgttattattatattatatatttttatgatgtatttgtattaatatatagaattatgtattaatgtatagaatataaatgttatatatgtaattatatatttataattaaatatgaaaaaggaaagaggaagagggttgtggaaagaggaagagggttgtgatttttagagttatatattgatagaaatttataataaataaagaaattataaagatttataagtgaattagattttagatattgttttgtttgtcgtttattttgattgggatttgatttttatgattttttatatgagaggaattatttagtgattgagttatgaaatcgaaatttagtttttttattgttattttattgtagatatgtttagttatatgtaattataatatatttaagataaatttagttaaagattagattaagtgtgtaagagtcgagtttagttattttaaattaaatttattggaggagttatggaaggtgagttgaggatgtaaaggatttaggtatgtacgaggtgttatttttaggttatatatttttgttggattgaaagttgatttaggtaggtattatttttagaaataaaatgttaaaggatgatttagaaatatttatttatatgtatattgtttagtattttttacgtaaataatttattgatatgtgaaggaggtagtggagagattaagttagggataaaggtaaaataagaatgtggtagatgagtgatttttaatttttttggtattagggataggttaattagggattggttttgtgaaaggtaatttttttatggagtaggaagggtatggttttgggatgaaattattttattttagattattagtaattagattatgataaggagtatgtaatttagattttttgtatgcgtagtttatagtagggtttatgtttttatgtgaatttaatgttgttattgattatttaggtagtaatgttggtttattttttttttttattattgtttattttttattaggtagtttggtttttaataggatatagtttagtattagtttatagggtttgggggttggggatttttgtggtagattgttatattggtgatttttagggaattaatgaattttttagcgtttaaattttagtgtagttttttttatattgaatttggtattggtattgtgttttgttttggttaagggaatattagtaagtgtgattttaatagaggttcgataaatattttttttttttgagatagttttattttgttatataggttggaatgtagtggcgcgattttggtttattgtaattttgttttttgggtttaggtgatttttttgttttagtttttcgagtagttggaattataggtgtttgttattacgttttgttaatttttttgtattttaagtatagatagggttttattatgttgttcgggttggttttaaatttttgaatttaagtgatttatttgtttcggttttataaagtgttgggattataggtgtgagttatagtatttagttaaatatttatatattgggatgtttttgtagaagttagaggggatgtaagaaatataattattttgagttagttatgttgtgggaatattaaagttagcgagggagtaaggttatttggagaagtaatgaggtgttaaatacgtgagtgaaattttttgggttttttagattatttacgagatagtagttaaatgtagttatttaagttgattttatatgtaataggagaattatttagttaaagttttttagaatttttagtttatagaattagaggaaataataaattattatgttttaagttttaatatgatgaagtgatttttttatatagttatcgataagtaaatatagggtttataagagaaataaaagaaaattgtattttggaagtagtaaattttgtttgtatgtttttggtataattttattagttggtatttagtaaaaaggttagtttaagaattttgtattttagtaggttttttagggatatcgaagaaaatattttagttgtttatttttaagaaaattttgagagtttatttatgggatataattgtaaaatgtttgtcggtgttttttgttagtatttttgattttgttagtttaggtttgcgttattttttttattagaattttattaaagataattttgagattgggaaaagatttgagttttttttgattatgagtgggtttagaggatataaatatttttcgttgttttatatttttttttttgtttaaaaatagtagtagtggtattattttttttagttttttagttagtaattatggttgtttaaatatggaatgttttaaggtggtttaggatattgatagggaattggggttatggttttggaaatgtaagttgttgagtgaggttaagtggtttatggaaattacgatttttttgtatggtgggattataaaggtgattaagaaatatagatagaaatagaagaaaatggaattaagagttgaaatatttatagaatagaattatggaatgtaaaataagtaaattttatttgggagatggggtgaatttattattggttattggaattttgagtttgtattttttttttaggaaggcggtttgaaatggagtgggttgtgtttggtaagggttgtagtggtttggaatttgagtaaatgagtagaattagagaaatagaattagttttttgattgtggtattttttatattaatttagaatttgtttatgtgttttttttattttacgttttttattgtttttattttttggggtgttttttatttttttttttattttttatttgtttggttttcgagttgggttttaggtttgtttttttagagtaaatgttcgggattattgaggaagcgttggttgcgttggtatgttaggtaggtttgtacggtttagcgttgttttttgtagtttagggtgaatatgggaaaaagattgtttacgtttagaagtaacggttttttgttgttagttttgtttttagtgttttttagtaggtattttcgtttttttattatatttttaatttgaatgtatatttgatggtgttaggtttcggtataagttttatcgattttttggaattttttaagataaagtttaaattttttaataagattttaagaattggtttgtttttttttttagttttatgttttgtttttttattttaaattttagttttttgaatttttatttttttgatagtattataagtttttttgttttagagtttgtatatatgtttagaatttttattttttattttttttgtttattataaatttcgttattattggtatgagtaagtgagtattttatttttttagttaatttttttttatattattttgttttttagtttgttttattagatcgtaattttaatgagaataatgaatttagtatagtatttgatatattttagaaaataagtatttgtttaataaatgaatggtgatgggaatcgttttttataaagtcgaataatatttattattgtgtatgggtggggttgttttttaaaagttattatttattgtttatattggaagaaaaaaaaaaaaaatagtcgagtttaaattttagtttgtgtaagtggcgttaggaatttaatttaaattcgaagaaggaagatttttgcgaattttatatttaatatttatttatagtgagaaaggcgttgttggtttttagtgttcgttttttatttcgttttttttcgcgtttttaatgtttcgtagttttttattttcgttggagtatttacgtttttggcggtgggtgtaggtgaggttcgggacgaggagggaagagtagtttcgatagagagttttttttatcgagggatttttgggggcggaggaggatagtggtttggcgttcgcgttttttttcgcgtttttttcgcgtttcgttcgtcgttcgtttcgtggttgttttatcgtcgtaagacgagtcgtttcgtaatggtttttttagtgtagtagtaaaatttcgttagcgtttggttttcggggttttgggtaaggatataatgggcggtttgcgggaggggagtagttattttgggacgtcgagtatcgttttcgtggggtttttgtcgtagatttatttggtataggaagttgagtttttggaaggtttcgcggttttttatcggtttcgttattatcgtcgcgttttagggtttttcgtagttttatttttcgtatagtttcgttcgggcgttcgcgcgaagttttttgggaaacgtagttttcgcgttttcgggagtttttcggaggttttataaatttatcggtttttaaatataattttagtaatttatgtttagggtttttttatgaatttttagtgtttttgttttttttaagtttatgattaattatattatttagagatttagtggagtaggtgaggattttaaatcggttatttttaggatagaaggttggtttttttatgtagttacgttggggagatggttatgtgtaatttatatttagttagagtttttgttttatttttttgaggttcgaggtagatgtttgtaagatttatagacggaaggtatagaggtaatatattaaaaaaaagtattggtgttagtgggggtgaaagtgggaaggattatgagggtgttggagggagggaaaaggattttcggtttttagaaagtatagtttatttttattattttatttattaaagaaatatattttttgttatgtagtgttggatatatagtaggtgatttttattttttgagtgaatggtttttaatttttaggtttaggtatagtatagaaatttgttaatagtattttttgtttttgaaattttattttattttttatattgatatttattttatatttttttttttgattttttttattttttagtttttttgtttggtgttttgtgatttatagtgattattagttattgaagttagaagtagagggatatgaattggaggggtagaagattaatgaattttgagatggggagggtagtataagttaggagaggatgatttttttttaattttagatttagtgttaggcggggatagataagtagggttttagttgggaggaaggatatggttgaaattttttttggaattagttttataagggttttcggatttaaatgagagtggtgtgtttaaaatgtagatgtaggttgggtacggtggtttatatttgtaattttagtattttgagtggttgaggtaggtagattatttgagtttaggagttcgagattagtttgtttaatatggtaaaattttgtttttattaaaattagtcgggtgtggtggtgtatggttatagtttatagtaattttagttattttggaggttgaggtaggagaattgtttgaatttgggaggcggaggttgtagtgagttgagattattattgtattttagtttgggcgatagaacgagattttgttttataaataaaatgtagatgttcggtttattttagattttgattaattattaagggtgagatttaggaatatgtatgtttaatatttagtgatttttatatattagtataaggttgttattaaattattatataatatagagattattttagtggattttttgttttatattattttaattaattaaagtattttgttataaagaattatagttaaggtataaaggtaagaggaggagagtttggataaagttttgttgaggtggtaggaggaattgaaatgtttttagtaaattgtagattttttttttagttatttttgtgaagattattcgaatagtagataatttaaattggtttagtttggtttggtatgtattatttttattttttatgataatatatgtattttataagttgtttattttggtttaatatgaaaattatttatattttttgaaaagggaaatggtaaagggtgagggatggtaataaataagtaaaagtttggtttaatattagttttaggttagatgtatataagttaaatgaagttgtttatttggtttttttttatatattatttttttttattttgtttttagggtgagaaagattttataatttttttttttttttggtttggatattttggttaggtaagaaggttgataatttgggagtagttattaagtaatattttttaaggttagggttttgtatataaatattttttttttttttttaatatttgatttttttttttaagtttttttgggaatattgtgaaaggatagatgtgttttgtaggattttttttattttgtttttggagaggagtaaggtgattgatttattggtatagaggtaggtaataagttaattttgttgaaggttgaggtagggatttgggtttttttttgttttttttttagtttttttttttttttatatttttatttttggttaattttatttataatcgtaattttatttttggaatagaagattaaagaaattttttttttttttattaatttttaggaatttgtttttttagtttatttttttgatttttttagttttgttgatgtttaatttttgtttttagaaaaattttttaatatttagatttatgagagtatttgttatttattttttatgaatttagaggtatatagatttttgtgatttattttaagaagtaagattattttgggttaaagaattttttaaaaagatgtgtaggggtttttgtttttttttttggtttgagtaagttagatttttatagattttttgtttttggaaaagttttttttttttttttgattcgtttttgtgtaatagaaaatttgatggattttagggtagataattttttgggaattagttttttattttgatagttaggaggaagttatagttgtgtttttttatttagtttagttttatttttttttttatataaaattattttagaaattaaggtgtttttttaagatgatttaggattggatttaggtggatacgaagacgttttagtaggatacgggaaggaggttcgtagtatttgattttgttttattttagttatttttatattttaatttgttatttttaatttgttgggggtttgatggtaagtggtgtagtattttttcgtttagttcggatgtttgggtagaagaggggttaaagttttttagtaaaagtattagtgaaggtgtagatatgagagcggtttgtgatattgtagaaagatagtgtgtcggttttatagtttaggaatatgtttattcgtttgggttttattttgatgtgtaaaggggtaaaaggtgtggtggtggttgtatatttgtttttattttatagtcgtattcgttagtagttagttttagggagtggagttaattcgttttttcggtttacggagtttcggtatatatttattgtttagtgggttttgtcgtttatttttattttttagtagtgtcgatttgaggtgaaatttttagtagttaggacgtaagggtagaaggtgaaacgttttggtgtgttagggagatttcggagttttgtttttacgaatttgacgtttttacgattttttgataggattaggttaggatgagttgttttagggtttagggttatattcgttggcgggagaagttagagtggggagttagatgaggatgggaatagttaaatgtttttgttttatttttttagtttgtttttatagagtttggttttttaaaggtttttagaataatttggtttggttaatttttttaatttatggtgttatttaaggaaggggagaaagtaatggtttattttttattttgattttaaagtaaatagataataattttttgagtttgtagtggttggtaatttaggttttcgtttggttttttttttatttttttttgatattattatttattttattatgtagagaagtataaggtgtagtttgaggggtagaaaaaaacggaaagtgttaagaaggatgtcgagtaagatagtatatggtttagggatagggtgattatgtgtgttttttaggaattggtttggtttatgattattttttttgtatatttatattaatataatgatatttttttttagtttttttttttttttttttttttgagatggaattttattttgttttttaggttggagtgtagtggtgtgattttagtttattgtaattttcgttttttaggtttaagtagtttttttgttttagtttttagaggagttgggattataggcgtttaatattatatttggttaatttttatatttttagtagagatggggttttatcgtgttggttaggttgatgtcgaatttttgattttaagtgatttattagttttggttttttaaagtgttaggattatagatgtgagttatcgtattcggtttttgaaggttatgtaagtttatatggtaaattatataattattttattcgatgattttggtaaattatttaatttttttgggtttttatttagaaaagaatggatttaagagtagataacgtttaaggtttttttttattttaagttttgtgatttagggtgagattaaaagttagataaaggggtaggtgtgtgtgggagtaagaaaagtgagatataggataattgaaatttatataaggtaggatttaaaaatttttttttttttagtggttttttttagtttttttttgggaataatttattaattagttgtttaaggattttttttagggtaaagtattgtcggggaaaattgttgaagtttttttttagttttatggatattgaagttatttttatggtttttatttttttatatttaggagggatagggagataggggaagaaagggtagggttagggagaagttttagttaagtgattatttagatgttaatatttttagggagaaattaaaattttttatttttttatttttttttttttttttgaaaagtttatttgttgattttttttattaatttaaggagagttttatgatttcgtggatagatcgttgagagtgagttttcgaattttttaggaatatttttgtattttatgtaaatggatgattgttttttttgtttttttaattttttttttttgttattttgtttggatataattttatttattggtataagtagaatttgattttattttattatttttttttttaagaagttttgatgtttaaaggggaaaagggattattatttttaataatttgttttttaattggttttatgggtataatgaatatttttttatattttgtttagatatattatatgatttttttaattttatttttaatttaaatttttgattgtattttttttttttaagttaagatttaatttatttagagagatataataattatttatttttttagggtatttttgatattttagaaggaaggagaaaagaaagtaatattggttttggtatttagtggttttgaaggtaaaaggtttttttttttttttaaagttttatagttataaaatagggataggataaattgagggttatatagtgtaagaagagttttagcgggatttgaatgtattttttttaatttaatttttatttttaatttttggttattatgaagtttggttatttatattattttttaatgattttttttatgtttgtttttgttttttaaggatgttgggagttttttataagggatagggattgtattaattttttattttgttttttaagtattaattatatattttattttttttgaggataagtatagagagttttagattggtggtataggaataaattatatatttttgttacggtttggtattttttgttttgtattagttaataaatattaataattggttgggtatagtagtttacgtttgtaatttgagcgttttgggaggttaagacgggtggattatttgaggttaggagtttaagattagtttagttaatatggtgaaattttgtttttattaaaaatataaaaattagttaggtgtggtggtgtgcgtttgtaattttagttatttaggaggttgaggtaggagaatcgtttgaatataggaggtaaaggttgtagtgagtcgagattatgtattgtattttagtttgggcgatagagtaagatttttttagaaaaaaaaaaaagtaagaataaatatattaataattgtgtgttaatattgatttgtgaatatttggggtttagaagataaagaagataaatttttgttttataaggattttttagtttaatatggaaggtagaatatatatatatgaaaggttataggaataaatattaagtaatacgtaatataaaaataaatgtataatgaagttttattgttttaaatgttggtaatttaatttttaagataaaaaatatgttttttagttttgttaatattatttatttacgtaagagaataaaatattttaaatattttagaggtattattaatatatatatattaaaagtaatatattatttaaataattttaggtatattttattttattgtatttcgttttattgtgttttgttgatattgtatgttttttagatagatggtttgtggtaatttgtgttgagtaagtttattggtattatgttttttaatagtatgtgtttattttatgtttttgtgttatattttggtaatttttataatattttatatttttttattattatatttagtatgatttgtgattagtgatttttgatgttattattgtaatcgttatgggggtattgtgaattgtatttatataagacgaataatttaatcgataaatatattttatgtgttttaattgatttattattagttatttttttatttttttttattttttttggtttttttatttcgagatataacgatattaaaattatattaattaataattttgtaatggtttttaagtgtttatgtgaaagaagaattatatgttttttattttaaattaaaatttaaaaatgtttaagtttagtgagaaaggtatattgaaagttaagatgggttgaaagttaggttttttgtgttaaatattaagttaggttgtgaatgttaaggaaaagttattgaagaaaattaaaagtgttattttagtgaatatatgaatgataagaaagtgaaatagttttattgttgagatggagaaaattttagtgatttggatataagattatatgatttttttaagttaaagtttaatttagagtaaggttgttaatttttttagttttatgaaagttgagagaggtaaggaagttgtagaagaaaagtttaaagttaggtaggttgttttaagaaaagaagttatttttgtaataaaaatgtgtaaggagaagtagtaagtgttgatgtagaagttgtagtaagttatttagaagattttgttaagattattgatgaaggtggttatattaaataatatatttttaatgttaataaatagttttttattgaagaaggtgttatttagggtttttatagttcgagagaagttaatgtttggttttaaagttttaaaggataggatgatttttttattagaagtaagggtagttggtgattttaagttgaaattagtgtttatttattattttaaaaattttagggtttttaagaattatgttaaatttattttttttgtgttttagaaatggaataataaagtttatatgatagtatatttgtatatagtatggtatattgaatgtttttaattaaaaaaaattattttttgtagagatggggttttgttatattgtttagattggttttgaatttttggttttaagtagtttttttggtttgattttttagagtgttgggattatagatgtgagttaacgtgtttagtttttattgaagttttttttggggggatggagttttatttttgttatttaggtaggagtgtaattgtatgattttggtttattgtaatttttgtttttcgggtttaagcgattttttttttttagtttttcgagtagttgggattataggcgtttattattatgtttagttaatttttttgtatttttagtagagattgggttttattatgttggttaggttggttttaaatttttgattttaggtgatttatttgttttggttttttaaagtgataggattataggtgtaagttatcgtgtttaattttttattgaaaattttaagttgagatttattgtttagaaaaaaagattttttttaaaatattattgtttattgataatgtatttgattatttaaaagttttgatagagatgtaaaatgagatttatgttgtttttacgttcgttaatataatatttaatcggtagtttatggattaagaagtaatttggatttttaagttttaataaatgtattttataaagttgttataaatagtgatttttttgatagatttaggtaaagtaaattgaaggttttttggtaaggatttattattttagatgttattaagaatatttgtgatttgtgaaaggaagttaaaatattaatattaataggtatttagaagaagtttattttaatttttatggatgatttttaggggtttaagatttttatgttgtaagtaattgtaaatgtgggtttttaaagatttttaaagaagttttattggtgagtaaaatgttattaaatagtattatatgtttagagatattttttataaaaggaagagttgaaagtaaatttcgtcgttgttttattttaagaaattattatagttattttaatttttagtaattattatttcgattagttaatattaatataagattttttattagtaaaaatatgattttattaggaaatttaataattaatgtgatttgttttattaagatattcgttttattgaagtggtatggaattgaatttataatatttttgaggtatgtttgtattttttaaattatgtttttgtttttttttagtagtatataaattaaattttaggatttaaaagtaatggtaattgtatttataaaatttttaatgtatagttttttattaatttaggttagatttttttttttttaaaagaatgaattttttttttggaatagattaagtatataattgttgattagagataagaatataaaaatggttagaaggggatgggagaaattattttttcgtagtaaagattttttgagtatatttggtagaaagaattggatttagagaaggagagtagaagaatgagtattttaggttgataaattttaggttacgtaaagttacgttgtatttagtttgaggggttatgtaggggtaaaggtcgaattttaagtatttcgaagtttgattgtaagtatttgttttttatttcggtagttaagtgggttaggtttcggcgtttgtttttaaggtgagtagtattttttcggagtcgttgtagaatgttttgtttttttttttttagtcgtgaaagtaatatttgttgttttttatttagtcgtttatgaagttttttaaatttttttaagatttgttgtcggcgattttttattagtttttgagaagagagggaagatgttgtattagtagggttagtgtggtataaggaagttttttttttatttattatatgtatgaattaatatagatttttagttttattgaaaatggtttaataaaggttgggtgtggtgatatatgattgtaattttaggattttgggaggtcgagggaggtggattgtttgggatgagaagtttgagattagtttaggtaatatggtgaaattttaattttataaaaaatataaaaaattagttgagtttggtggtgtatgtttgtagttttagttattggagaggttgaggtggtatgatggtttgagtaaagaaggtagaggttggagtaagttgaaattgttgtattattgtattttagtttgggtaatagatcgagatgaaagatagatagataggaaagaaagatagaaagataaagatagaaagaaaagaaagaaagaaaatgagagaaaatggtttaatagaatatttattttttattttattggaatttttttttgtaaagaatggttttattattattatttttttattgatgatttggtagtgaagattattgcggatatatatatttgttttaatttaagataaagaatttaataatatgatgatattaattattatagatattagagatatttgtgttattattaattgtaaagttttagttaatttaatttgtcgagaaaaggaaagtataggtttagtatggtggtttatgtttgtaaatttagtgtttaggaggtttaggtgagaggattatttgaggttaagattaatttaggaaatatagtgagattttgttttaattaaaaagaaaaaaaaattagtcgggtatggtaatgtatatttgtagttttagttatttaaaaagaattaagaggatggatggtttgaatattggagtttgagttagtgtgttgtgattattattgttttttagtttgggtgagtgagattttgttttaaaataagtaaataaaaaataacgaaataaaaaggaaagtataaataataaaaagttaaaaataagattgttattttttgtatattgtaatatatgtattagataaaaattagagaattgggaaagtgtaagaattagtaagagttatatgggttattataaaatatatatatgtagattttagggttgaatttgttaaattgttttaagttattttagagaattggtaatttttattttaggaataggttatagaagtttgttagtaatttagttttttgaaatttgaaatatgttttttttaagttagtatatagatttaagtttttaatatttttgaaatttgataatataggatttaaatattagttataatattttttgagaattattagtatatttttttttttgtatttttattataataaatagtgatttttttaaagaaagaattttttaagtattatgtgattgatgatgaagtaaagtgagaagtagagattgggattttagaaggaagtggatagggaatgaaaggtaggtttgagggtggagagagagtggggatgtaaagttaggatgggtttgataagcgtggtatttgtggatttaagttagtttttggtagaggttgattagtttttttagtttagggttatttgttgttttattttttattattgtttttttagtgtatatttgaataaaatatatttttatatttgtttttaataaaatatagtttttgtgtgtgtgtgtttgtatatgtgtgtgtatgtatgtgtgtttgtttaggtatgggtgtaagtttaatatttatgattgtgataaataggaagtaaaaaggtttttttttttataaatcggtaatttttttttttttttttattttatattttagggtagtggtttttgatgaagttgttaatatattttgaggatattttggaaataggtatatttttttgttttttatggttggggaagtttttgataatgacgtaagtatttttttaatgtgtgagataattcggtatagtgaattgatttgtaatattttttaatgttttgttggatatttaaaaatataggtttgggcggttaggtacggtggtttacgtttgtaattttagtattttgggaggtcgaggtgggtagattataaggttaggagatcgagattattttggataatacggtgaaattttgtttttattaaaaatagaaaaaaaaaattagttgggtgtggtggtgggcgtttgtagttttaggtatttgggaggttgaggtaggagaatggtatgaattcgggaggtagagtttgtagtgagtcgagatggtattattgtattttagtttggatgatagagcgagacgtcgttttaaaaaaaaaaaaaaaaaaaaattataaaaataaaaatataggtttgggtttgaatgttattttatatagtataaatatagagtaatttttatatggttttattatacgtgaattttttagtaatagttgaataaaatttaagattatattgttatatttagaattttattaaaagttattattatgaaaaattatattattaagagttaagttatttatggtattttaattatattggtatatatttattttagtttgaatttgtatttatggcgttgttgataatgatatatataggggtaagtatataattagttatattgtaaagtcgtttagggtagttatgtttaaatattatatattatattttattattaattatgttttattatattatatttggatatgatagattttttaaaatttaatattatgtatataggttatattatttgtaatttttagtttagtataattataaattattttttaaaggggtattgagtttgatgagggagaaggagggagaatttaaatggttataagaggaatgttggtggtagttttggagattattgaaatgataatttatagtttaaaaaataggatagttttgtttaagtatttagaaggttttaaaaaggtatatttttttttttattttttatttttaagaaggtgattaatatgaagaagaaagttaatgattagtaataagtattatttttatatttttaggttttttggaaggtttttaaaagaataaaaaattttaaaagtttatatttttaattaaaattggtttaaattttaaaattttaaatgtttattttgttaaaatgtataaggtattaaggtaataatatttgttttttgatgaaatgttattatttatttaaaaatttatgtttttatgaattaaaatttggatttagtttttggtgatttttatatgttaatttttaaaaatttattattttttcgggaaatttttaatgaggttaaatttttatgttgtttttttatgaatttgtagttgtgtattttgtgttattatttattttttttatttaattttaagtttaaggagggtaggaattgtgtttttgtttattattgttttttagtgttaaatatcgggtttggtttaaattaggagtttaataaatatttattgatttacgaagaattagtatttttggttttgttatttattggttttatgattttggattagttatttatttaaggtttatttttttttgtgtaagttgaaggtaataatatttattttaaagaatatttaggtttatttttatattttattaaagatggttttaggatttttttttgtttttttttcgtagtttttttatgttttatttattttaatttggtttgaattttaagattttaataattttataaatttggaatgttacggatatttaatgaattaatgtataggatttaattttagttatttttgttataaatgataattgtttattgtttaatggaagatagatagatattaaaatattatgttataaataaggtaatgttataaaagaggtgtaaaattgtatgaaaattaagaatgttaatttttgaagggttaggaaaggttgtataggaagtggtttttatttcgtttgagagatgaataagattttatggtggaggatggggagggggagaatattttagtatatgtaagtttatttgagttttaagaatgtggttttaatgttattagatagtttttttgagatttttggttagttttttttttttttttttttagtgaattttttatatttttttttttttaagttttttaagaaatttttatttttgtttttttagtagaaagttttttttgttgttttaataaaaaaaggagattaagaggtacgaatttttttagtttattagatgtaagatattttgtttgttttttattttttaaattttttttaatatttaatttatgataagtaatttaagtataatgtttaatgataattaagtttaataaaatgttattatttttgagagaattatattgtttttttttttttttttttttgttttttttgtttgtttgagatagagttttgttttgttgtttaggttggagtataatggtgtgattttggtttattgtaattttcgttttttaggtttaagtaatttttttgttttagtcgtttaagtcgttgggattataggtatgtgttattatgttcggttaattttttgtttttagtaaagatagggttttattatgttgtttagggtggttttaaatttttgagtttaagtaatttgtttattttggtttttagaattgttgggattataggtgtgagttattatgttcggcgagaattgtatttttttaatgaatcggaattggtggattaaatagtgtatagttaatttttttataggtaaatattttttagagtagtttatatgggattgtttgtttttattttgagtttattaggttttttttttttagaggatttgtagcgagtgattttttgtagtttttgttttaggggttttagatatttttgtagttttttttgaggggtagggaggaagtgggagaggtgatatttggggttgattggtatatttattatttagagattaaattatttgttttaaattatttatttgttttttagttattttattgttttttgatttgatttttttttttgtttgttatttgggatgttaattttttatagtttttttttttgttattagtttgtttatattattttttttgtttatttaattgtttttttattgaatttgagatagttgttattaattttgtgtttttttttaattttttttatttttttattgaggtaattgtttattattatttaagtaattttttgtattttaatatttttttttaaatttgtttttttatttatttttgtttatttataataaaaatatggttattatattgtaagttatttgaaattttgtttttaagagtaatataattaagtaaagtatatgataaaatgttaatatatttatatttttgttttttttatttaaatatttttttttgttttagtagtaagttaaatgatatgttatgttatttattatttagagaagttgtaaataattgaatggtttagtttagttcggtaggtattagttttaagcgatattatttatgtttaataattagtgtgaaaataaggagtattttgagtaggtaggtagaatgaagaaattagattattttttagttttttttaagtttaattttttttatgtggttttatttatttatgaaaaatatgattatatatattaatatttatttataagatttatatgtattgtaaaagttagagagaaattttagggtattttttattattgtttttttttaggttagaggataattgattatatatattgtgtgtttttgtatatgtagttttgagaatataaagtgagtagtaggagtttacgatttttatttagggagtattttattttttgtcgtttttttttttttatttatattgatatcgtgtgtttgtttttttattttgtatttttgtgtagtatcgtttagtggtataacggtgtgagttcggtgggtgtgggaaattgtatatattaagtatatagttttttggtttttataatagaaaaggttgagggttttatggtgttgggggtagaggtttttatttcggatttttcgtttgacggtttggagttgtttggtaatttttattatattgtttagttgtcgattaggtcggagattgcggtagcgggatgtttttcgatagataggataagggaagtttttttttaggtttttttattagcgggtgatgtaagttttgtagaagttgtgtttatatttaatgatgataggtttttttagatattttaggtatatagagtagttcgtttttatttgtaagttttttaaagtcgtagttgtagaggttgtagaggttttagtttttaatagatttgtttttgttataatttaatttgggagtggggaagaggatagagaaaataaaaatattaattggaggtttttttttttttttttttttgtatttttgattcgatatttatttttatgttaagttttaattttagatttgtttttttttgttattttttatttttttttttaattaatttaatttttttgtttttttatttttaaaatttgtgatttttagttattaatttttttttttttgttagtaaattgatatataatttttaattgatttattttgttttttatttttgtttttttttgttagaaagagaagttttttttaattttagtttagtatattttttttgatttaggtttattttatttatattttagaattaatagttttagatattgtattttcgtttgatatacgtttttaatagataagaaaggaatttgagaagtaaaaaatgttataaaaatattaatattttttaaattaattatattttaaagtttaatgttataagagttttatgattaatttattggagtttaagtttgattttttgatattgtttttttatttttttaaattataatatttaattttttggtttttttgggtttattggaagaagtgttttgggttagatataaaatatattgatattaatgatagttgataagtttaaaaaaaaaaaagtttatgtataatttttgttttattattattatagaaggtttatgtataatttttattagttattatagataagtaaagagagtttttatattgaaagggttagatattattgttttaaaggttaataaatggaatgaatgaggtaaaggtaattttttttttttaggaaaatttgaaattatttttttttttatttattagattagtttaaaggaaatttgttttttttttggaatgatattttacgtaatattttattttttttgtgtttatttggatatttagaattgttgaaaattgataaattatggtaattatattaaatattgttgagtttaggttaataattttttgaaaagagagtaacgagtttatttgtagtgattggaattttttaatatagttattgataattaatattttgggtatagtgtgtttttaatttataggttttggagtggttgcgaattaagagatataaaagaggtaatgagattttttttaagcgtagttttagaagaattggaaatgtataggagagatttataaaatataaggttggttttttattttatttttaaaatatttatatttttagttatgggtaagttgatttaattatttttataatttttttttttttcgatttttatttttttttagggatttattggaaggaaggaaatttggtagatttatgtgttgagagataagtggttatgtaatgaggtaggttaataataattgtttttgtatatattgttggtatatataaatgtgtttgatttggagtaggaattgataatttttttggatttgaattttttttgttagtaataggagagaagtttagttagatgatttttatttgtgggaatttaattttgatttgtggtgattttattttttttttagttttttataaattaagtggtttttttatttgagacgagtagaattgtatgtatagtaaggtattaggacggatttagattggtaaagaagtggtgagagaaatggggaaagggttagggaagaagggagaggatttttaattatagttatagtgagattttgagtgtttttgcgttagttttttttttttttttattttttgtgttttagttgaagggtaaattttagggataattttattttgtttttattattgtttagggttttattttgcgatttttttttgagaggttgtttataattttgttttattttcgttttttattttttttcgttagatttggggttgggtattggagaggggaaagaggaaacgtcgtggttggtagggtaggaagggatgcgtgtttaggtgagaaagaggtgtgacgtgtagatgggatgttcgtcgttatgacgttgtcgagattcgcggtgattgcgttagagttttattcggggaggtgagtagtagcgggacgggggaacggcggggtagttaagtaacgtcggacgcgttgacgtcgtcggggcggtaaaacgttcgttcgggttcgaggcgggcggaggtagttgtggttacgtgcggggggtcggtgacgtagtcgcggggcgttgggacgcggtttgcggagtcggtcggcgagcgtaggttttaggttcgggcgcggcggcgggatagtatttattttttcggtttcgggttcgggagtgcggggcgcggagtcgtcggagcgttgttttttttttttttttttttttcgttttcgtttcgcggcgcgatatataatattcgtcggaagcggaagtcgcgtcgaggttcgtgttagtggaagttggggtgtcggcgggcggtcgcggtcgggtttagtggtgtttgcggaagaaggaggaggagggttggcgatgagaagtagtagggggaattaagggtaagaagggatttagaggggtaggtggttgagatgttggcgtttaggtgattcgaggaattttttggagatataggttcgcgtatgcgcgtgttcgagcgttgaagtttattgttcgtagggcgttggattggcgtttcggtcggcgaggttgtttagtttaggttttaggtttcggttttggttaggcgtcgtcgtttttcggtgtagttgaaagtcgacgaagagggcggggcgggggcggtttgtggatttttatatttttttttttttcgggttagtttggggagagggtggttagttgtggcggcggttaattacgtggcggatttgcggggttaagttggtacgttattttcgattagtggagtttttagttttttaatatttaaggattaggtaagtttttttcgcggtagattttaaatattttttgttttgtttttgtttggcgaaatttatcgaaattatttatttatttcgttggagtgggagtcgggggagagttggaatcgcgtttttgttgtttatttttgtgtttttagttttttcgtatggggttcgatcgtaatacgtgcgttggataaacgtttgttaattgggtgagagttaaggtttgttttttttatttttggggttgtgatttgagttttttcgtaggagtagatagtgtttgtgtagggattgcggatttttgtattatagtttttttgttttgttcgtttgttgttggaagtttagtaggttagtgattttggaggaagtgggtgaggtgatgaggttggggaagagtatgttgggagaggtgtgaggggttcgggaagaggtgatggggttggggaggggttagtagtgggtagaggtgtgaaaaggttgaggaggaggggttagtgttaggaggggtgtgatacggttggtagaaaagatagtttgttcgttttttcgtcgttagtattagttatggagaatatttattgaaagagatgagtagattttgttgtatttttttcggtgagaaagggttttaattttcggtgtaaattgtattgttgtttataaatattttgtattatttaattttttattttgggagttagaaattatttatttgttgaaaatataatttagtatttaaggtataaagatttgggattatatatgttaattatagttgtttatttttattgtttttttttttgtgttaagaattgaagaagattaaatttgagaaaattatatttgatatttttttttatattgttatgtagtcgttagggattttagtagtagtatttgttttaatttataagatgttttatttgtaagggtagtttgaaagttattaattgggtagtgagtttttttagtcgtggtttcggagggagagagagatttggttttgatttgttaatttgtggcgtttaagatgttgatagtttttttttttggttttttgtttgtagataattaggaggaatgtgattagattaaggaaattaataagaggaggtttagttttaaggattgtgaagaatgtgtttgtttagagattgatattaaggggattttatgttgaatatggaaggaaaaaagggagattgtttaggtaaaattataaaattatgaagcgtaagtagtatgatatataatagggtttggtaaatttttgttgtagagagttagagaggatatttttttggttttgtggtttatatttagttttttttttgtagtatgaaaatattattagatagtattaaatgaaggttgggcgcggtggtttacgtttgtaattttattattttgggaggtcgaggcgggtggattatttgaggttaggagtttgagattagtttggttaatatagcgaaattttgtttttattttttagtagagataaaaattagtcgggcgtgtggcgcgtgtggcgcgtatttgtaattttagttatttggaaggcggaggtaggagaatggtttgaaagtaggaggtagaggttgtagtgagtcgagatttcgttattgtattttagtttgggcgatagagcgagattttgtttttaaaaataaataaaagttaaatgagtatggttgtgttttaatgaaattttattatggatgttaaaatttgaatttaataatatttttaagtgttattaaatattttttttggattttggttttttttttttagttatttaaaaatgtaaaaattatttttagtttttgacgtatacgaagatagatagtagatcgtagtttgtcgatttcggataggataataatgaaatattcggtattttttaagcgatagtaattgggagagagtgaaaataagttataattttttaattttatttgtttgtttattataataataaaggggatttgaatttttaatataaatttgttatggtttttgaaagttgttaagatttatgaatgtacgtatattttttaaataagaaaaggtatattttttgtttaaaaaggattatagtttaagaaaagtggaataatatcgagttttgatgttgatttatattaaaggatttttaatataggaatatgtaaaaatgaattgtaataatgggatgtaattaaataaattttaaatatatatttttaatatttttatattaataagggaaaatagaagtaattttgaaatgattgagttatatagagtaaatgggtatataagtagtgtaggtaggaaattggttgaggttagatatgatgagatgggagggatgaaggcggggtttaattgtttaagatttgtgagatttttatttatgaaaaggtaatatatttaatttttttttattttttttattttttattatgaaaaattttaaatatagagatagtttttagtttgttttttatattttatagtggtttttattgttttagtttggtgatatagagttattttattttttttaaagtttgtattatttattttgtagatatgtgatttatttaataattttgagtagatatttaaggttttttttatattttattaaataaaggttgtcgagaatatttttgtatatatttttttagatcgtcgtgttattatattagtaggataaatttttggaagtttggttgttgggttcgaaggtatggaaatttaaaattttattagatttttataattattttttcgtaagtgtttggtaaggtgttagagttttggtatcgggaagtggttaattcgtaggttggtaaaatgaatttattatatttataaatagtataggtttgaaaaaaggaaagtttattagaaaggaagaattgaaatagtttttgtaaaatgatgattgagatagtgaaagaaatttaacgtaatcgattttattttgtttttaagttttaagttgtttttgtttatttttgggcgtaggttgaattaattttgggagaaatttagtttataaataaagagggtaatagtttttttttaaagtagattttttttttgtttgaggattagattaatattagttataggattagaatttttggtttagtagttatgtagttggaggttgtaagattttgattttttttaaattgtttttgtgattagtgtttgaggtattttgtagatttcgtatttgatgggttagttggtattatttatattaataaattggtttttttttttttttttttttttttttggagacggagttttgtttttgtcgtttaggttggagtgtaaatggtacgatttcggtttattgtaattttcgtttttcggatttaagtgatttttttgttttagtttttcgagtagttgggattataggtatttgttattacgtttggttttttttgtttgtttttttttttttgttttttagtagagatagggttttataatgttggttaggttggtttttaattttcgattttcggtgatttatttattttggttgtttaaagtggtttatttgattatgtggtttttatttaggaattgatttagtgtaggaagacggttttgattttttatagttttatttttgattaattagtatttttggtttattggtttttttttatttacgaagttattttttaaaattttgttttttcgtgttcggggagattgattttttatatagttggttttgcgtgaagtattttttttttattataatttttttgtttcgatgaattgattttgtttaggtatgggtaaggtgaattttttaggcggtaatagaatattgtagaagagtgtagtggggcgttttagtaagaggattaagtgtgttgttatggatttttttttagaggtatttatggattttaaggtaggagtttaggatagtaaaaagagtttcggtatggtattttagagatgtatataaattttagttatttgtaaaagttgaaagaggtttggaattagattttagatattaggaaagtttaattatttttgaatttttagaaaaggagtttcgtttttgtttggttcgtttggtggttattaggtggtttttgtttttttcgaaattttttagattaggagtttttgtttgtggggtttatttagtggttaataggtgattaattttatggttaattttagtaaggttgtatttatttttatttatattagtatattatgaaatatagtagttttttttttattttcggttttattttttaaggttttattatttttggtaattatagtttgaatattttaagtggaaaatattagaaataatttttaagttttaaattggtatttaaataatttttgttttaaattgggcgttgtattattttgatgaatatgatgaaattttatgttatattattttatttttttttaggatttgtattatttttttgtttagtatttatagtgtatatgtagtttgtttattagttatttaatagtttttttattaattttattgtttaagtattatagtgtttatatttatggaatttttattttatatgatagtggttttaaagtgtaggagtattaatgatggtaatttggatatataaaagagaagttataaagtgttttttttaagtgaaaaggtaaaagtttttgatttaaggaaattttttaaatgttgagtttgttaagatttatggttagaataaattttttatttttgaaattataaaggaggaaaaagaaatttttgttagttttattgttatattttaaaatggaaaagttgtagttatagtgtatgttaagtatttggttaagatagaaaagttattaaaattgtgggtgggaaatattattaaaaaaaattttttattaatagtaatcgggtttagtattattagtggttttagatatttatcggggattttggaatatattttttaagaataagagggaattattgtagtttgtttttttatagtggtgttatttttgatatttttatatttttaaaaatttgttgatatttttatttataatttttaataattttataataggttttgttttgtaggtaatgtttttaattttttgttagtagataggtatttattttattttttattgatatttagttttttttttttttttgttatatagtattataataataattttttgaatatatgttatgtgttggtagatttttgtgagaaaggtttttgggtcgaaggatatggtatgtttttaatttgatggatgttgttatattgtttttttagtaggttgttaatttttatatttttttataataatgtatgattttgttttttttttatttgtttagtaaagatatatattatttatgtttttattttttttttagttaataaagagaagttttagttatttttaattttttttttttttagtaattttgattatgttattgtttgttatttagattttttgtgtatttttaattttattttttgtttattttttttattggattgtttattagttttatatatatgtatatatgtatgtgtgtttgttttattcgtgtgtttatgtatgtaaacgtatatatatatatatatttttatttgtttttattaagaaatttattttgatttttagattttaatttgtttttttcggttttttataatattttttattttttatatttaaatattttttaaaaatattttgtaaaaggagaattttaatttttttttagagtagtgttgtttaatagaaatataatggaagcgagttaggtgcggtggtttacgtttgtaatgttagtattttgggaggttaaggtaggttaattatttgaggttaggggtttgagattagtttagttaatatggtaaaattttatttttattaaaaatataaaaaaattagttaggtttggtggtttatgtttgtaatttattttagttatttgggaggttgaggtaggagaatcgtttgaattcgggaggtagaggttgtagtaagtttagatcgcgcgattgtattttaaattgggtgatattaagattttgttttaaaaaaggaaatataatgtaagtcgtttatatgatttgtggttttttaattatagttgtattaaaaaaggtaaagagaaatagttaaaattaattttaataatatattttattttattaatttaatttattatatttaaaatattattattttaatatgtaattagttttaaataattataaataagatattttatgtttttttgtatattaagtttttggaatttagtgtatattttatatatacgttattaggtttgtggttaagtgtttatggttattgtggggtttagaatttatattcgaaaatatggtgttgtggtatagtaaattgaagaaatttagagttttttgtgatttttttattttttatttttttttttaaataagttgaagtttttttatttgtttaagatttatatttattaaagagaattgttgtttttttttgtttttttttgttagatttagagtgtattcgtatttgaatagatttttttagtgttaaagagaattatttatatgttaatttttgtttttagatttatttattttttttagtattagtttatagtagttttattaagtagtgtagagtttttattgttttatatttttttagtatttggtatttttagatttttgaattttggttatttttattgagtattttttatgattataaattagatagtatatattgttttatgtttataggttatttggtattttttattttgaaatatttgttttgtttatatttttttattgagttattaattttttttttatgaaggagttttttgtttattttttagaaaaaaaataatatttatttttgatagttttagaggttgggaagtttaaggttaaggggatgtatttggttagagtttttttatttatgggaattttgtagaattttgaggtggtatggggtattatatggtaaaggagtagagtatgttagttgaagttttttttttttttataaagttattagtttaatttttatgataatttattaatttatgaatattttttaaaggttttatttgttaatattgttatattgaaggttaagttttaatatgagttttggaggggataaatatttaaattattgtattttgtttgtggttttttaaatttatgttttttttatatataattatatttaatttttatatttttaaggttttaatttgttttagtattaatttagaagtttaaaattttatttgtgaaattaaaataagttatttatttttaaggtataacggtaggacgggtataggatagatatttttatttgaaaagggaaaagtaggttaaaagaaagggttaataagttttaagtaagtttaaagtttaagagggtagatattaaattttaaagttggggaataattatttttgattttatatttagtatttttcgtatttggaggaattttttttttttttttttttttttttgttgtagagatagagttttattgtgttgtttaggtcggttttaaatttttggttttaagtattttttttattttggttttttagagttttgggattataggtatgagttattacgtttggattggaggggttttttatatagtttgtgatatggatttgtgtttttttttaaattttatgtcgaatgaaaatttttaatgttggaagtggggtttggtgggaggtgattgagttttgggggtggatttttttttggatgttgtttttatggtagtgagtttttgtgagatttggttgtttaaatgtatagtatttttttatttttttttttgtttttatttttgttatttaagatgtgtttgttttttgtttattttcggttatgattgtaaattttttgaggtttttttagaagtagaagttattgtgttttttgtacgggttgtagaatcgtgagttaattaaattttttttttttataaattgaattatttagttttaggtatttttttatagtagtgtaaaaatagatatatgtagtttggatataagttttttgtcgtttgtatgtgaatttggatgtagtagtataggtgtatttagttttgttttataagtatttattatgattttcgtatttttttgtatatgttttatttaagtaaatagatttataataaagttttttagaagattttttatatttttttttttttaattattataataaatagttagttgttttagagattattgtaggttttattattttataatttggtttttagtattgatattaggtaaatttaatgttgtttaatagtgttaaagaaaatattgaatggtttttttataattatattagagattttttaatttgtgttgatagtagggagtttttggtgatttgggttaaggagtaagataatgaaaatagaatttagaatgttttgtttaggaatagatgtttaaatggataagataaaaaagggattagagataagaatattagagaggaaatggatgtttaatgtgaattgaaggaatgtttgaattagattaaaatttaaaattataaatgagaagtatagggaaattaggtggtaagtgtgtgttgagtagtagttagaagtttggtgtggttgtgattggggtgtttgaaagggtttgggttttgtagaggtgtgttggaaggtggtgggttaggaggtttttttttttttgtttttttttcgtttttttatgaggtaattgtatgtatggggttggggattggtagataggtaaggattttgtttattaggagagaagagagtgaatgggagggtggaagtggaataggaggagaaaataatttagatataaaaattttgtaaagtaatatagttatattatgatatataaggtgtttcgtgttatgattttaaaaataagatatttttgaagttagattattagaagtttaagtttagaagtttagttttttattagttataatttaatttaatgtatttttaattaagttataattagtagtttattagttatgtgattttaaataaattatttttttaaatttaagtttttaatttgtaaatagtatataatattagagtgttattaagtgattttttgtaaagtagtggtttagttaatgttttatttgtaatgtgaaatttatttataaatagtttgataatacgttttacgattaaaaaaattattgttatttatgattagtatattttattttatttaggttaattgtagtatttaagatgtatggtgatgaaattataattggattatgtttgtatttcgtttggaaaataggatttgaatgtaaaggtagtattaagtatatttagagtgaagagttttaataagtagtttaataagatagttttaggttaaagatgatgtatttagtggaatttagagaatatttttttatttgaagtttttttatattgttgtattggaaatgttttattgtatttagttaattagagtgggtatatggaattttgatattgtatttgattttgtttcgtagaataatttatttttttaatattttttttaggtgaaaatttaagaatttgtatgggtagttattttgatgtatatttttaagtttgtatttttttttcgttgataatgatgcgttatagtttttggttttatttatatgtgatgtgtaagatgtttgataaaagttagagaagttcgttgttgagttttgtttttagatttaaggatcggtatttttgttagattgggttgtttttgtttgaaaaagataagcgtgggggtgggagagattgttggttattttttagtatttgttttttttttttttttgaataaaaaattttagttgggtatatggttggttgaatataagttatattttttagtattttatgtaattaggtatggttatgtgattggttagtaagggtgagtagagatggtgtgtgtagtttttggtttatgttttttgttttgttttattgtttggagtgtagtataggtatggcggtaagttttgttagattttgtggtgggtttagttttttagggtagttatttttaaattttgttgtatattagaattagttggggaatttttaaaaatttcggtttttaggttatattatgtgtattaattaaatgagaatgttttagggtggaagttagatattattgtttaaaaaaattaagtgattttagtgtgtagtagattttgggaattattgttttgggagttttagagtaggaatattgaggaagtttatgttgttgatagtattttagtttaagattatttataataaggttattatatgttagagaaatagatttttattttgttaagttagatattattttagtgttttatggagtgattatttttaaatttttaaaaagtcgtaagattagtgtttagtaggtttatgtgatattatttttaggatataagtttttgttttgattttgttaagtatttcgtggtgaaaattagtggtggatgcggtagtattgttagtgtttcgtgtttttaatttggttttagtattaaaaagagttattagtttttagtgtttattatcggttttttggttttttttattttttattttttgttagttaaatttaggggtttaatgggtaggtgattttagtatttgtggttatttatgtgatatagattgatttatttttgataatttagtgtgttttttttattttggttaatgatgtgggtagttatttaggtagatattttgttttatttattagttgcgagttttttattttttaattggtttttttatttttagttttgttatattttgatttatttgtatattacggaaagaagtagttttaaaataagattttgtaattgttgtttaatagtttttattaatagttttttgttttaaagtttaaatataaggttttttattatttagatttaaagagttattattttttttgttatggtgagggttagcgttattatattatatttatttttgttgaatgagatgtagttttagattttttttattttattgtattttaagttagagttggtttgaaagatgaaagatgttatggtttgggtttattaagaagtagattgtgagataagaatgtgagtataagtagtttattttagaggtaattttaaggaattttttaattatattgtggatatttgtattttaattttattggaaaatttaatattagaatagtttttagttatattatttaaggggggaagaagttggagtatttatttattaattgttattttgtcgttggttgagtgttgtttttagggatattaagtttttttttggtgtaaattaagtatttaaattagttagaaaaaagtttattgaaagagtagttagtagtttttatatagaggtgaatgtttgaggtagggttagttttatggatatatatttatggagttggtttattggtttgttgttgtttttttgaaatttttgaataagggattttacgtttttgttttgtatagggatttataaattttgtagttagattttggtttaagggaatataaatggtatagtagtagtttttgttataaaatttatttgttatttttgtgaatttttaagtagggattatttttatgtttgttgtttggtattatgtttgttattgaaggtatttaatgaatgtttgttttaaatgattaaatttttttttttattttaatttttttgataggtaaaagttttgtagtgaaaaattcgaggatttttatcgtaagtgttttttgtttttagttattgatattggattttattcgtgatttttttttttttagcgtatttatgatatagatattagtttttgagttggaggaggataaaggtagcggttttgtgaattttatgttttagtttgggttaagggatttggaattgtatttgttttagaggtatgttagaggtaggaagaaattatatagcgggtgttttgtaggtaggaagagtatttattaggatttgaagattatgttaaaggtttttatgttaattatttattgttttgtttttttttaaagattaatggttgaaaataataaatttgtattgttttatagtttgcgtggttaggaatttggaaatggtatagttgagtggttttggtttagagtttaatgtggttttagtcgatattagttggggttgtagttttgaaagtgtgagtagggttggaggatttttttttaaggtagtttatttatgtgtttggtagggtgtgttgggtgtgtttgaggtagaaggtgtgttttttgttatataagtttttttttagagtgtttttatggtatggttgttagtattttttagagtaagtgatttgagagcgagagtagggagaaagttatattgtttttaatggtttaattttagaagttatatttgttatttttgtttgttaaaagtaagttatcgagtattgattatatttaaagggaggggaattaggttttgttttttttaaaggaagtatattatagaatttgtagatgtatataaaaatattatagggtttttaaagagttttatattatagagttttgagaagtaaatttttatgttttttattttatttgtgaagttgttaatttgatattaattgtttatttttttgttgttttgtttagtgttttttttcgtgtgttgatataataattagggtttataattattttttgagaagataaatgttgggtatatagaaggaaaatagatggagtggtggtggtatgtatttattttttagggttgttttaataagttattaaaaattgggtggtttaaaataatagaaattgatttggttaaaattttggaggttagaagtttgaaatttaagtgttagttaggttggttttttttggagggtttaagggagtatttattttatgttttttttttagtttttggtatttgtcggtaatttttggtattttttggtttgtaggtttgttattataatttttttttttattattatattatattttttatgggtgggtttttttgtatttaagtgttttttttataaggaaattagttattgaattaagggtttatttttaatttagtatgattttattttaatttgattatatttttaaagattttatttttaaataagattatattttgaggttttgggtggatatgagtttgggggatattgtttaaattagtatagggtatagataataaaatttatgggtgtttttagatattttttattagagaggagagtttttatgatattataatagttagatgtttttgatgtaggtatgtagttgggtatgaattagttagattgtaggattgtggttgttattagtttatatgtatatatttaattataggaagttaagaaaattagtattaagtataagaggttgaaaatggtaatagtatgaagattattttttagagtatttttttgtgtttttattgttaagtggttttgggaaatggatttttattaagtttgatttttatgttattattttgtttgagtgtttagtgttatgagatcgttttagaggtgattttttgtatattttggtttttaggtaaagttttgtttttaaatcgtataagtaaaagatgtgttttgttaagtgatattttagtggaagaattaggatattgatagaggaagtatttttattttttgattggtattttataggttaggaaagtatggaatttgatttttttgttttttaaattggttttatttttttaggaagggattaaaaggagttgtttttagtatagggagtaaatagaggttttttataaatgttaaattaaggaattttttttttatagggatagttgttggtataatagtagttaatgattatttatagtgatttattggatttttataatattagtatatgataggttttattattttatgtttttttttattattattgttatttattaaaattaaattattgatggttttttaaatttaatgttttgttgtatcgtttgatgtttttattgttttttttttttggatttttttttgtttatattgtgaagtttttttaattttgttttaaatgttaggttattaatgtttttttttgtattatttttatatgtttaattagtattgttggattattgatatttttatatttgaattgtgttatattggagagttattttagtatggagattggttttgttttttattttttaatagtgtttgacgtgtggggtgggggtgggggtttagtttaaagaaggaatttaaggtttagtatgattgagtaatttgttaaaggttatatatttggtgtatggtagagttagaagaagaatttagatttttagttatttattaattataaagagaaaaatattgtatagaagttaggatgtttaaggattaatattgggttaatagtttttgtgttattttattttgatgagatattttatttttgtgaaattttttttattatttgtaaggttatttttagattcgtgaattgtaagttatatttttatgtatttttttttaaggaattggaaaaagttttaatattaatattttattttatatatttttttaaaaattaatgtttgaagagggaagttgtaatgtaggtgtagagaatgtttttttttggtttagagtattaggaagttggattaggtattttgtagggtttagggttttttttgattattgtagtttgagtttttatattttttttgaatattttttattgatgattatatagttttttatttatttttttttttattagtatgttgaggtgttatatttttttagtagttttgttggcgtgggtgttatgtgttgtggggaggtcggggtggggtcggggtgtgtgcgggatggttttttttttgttgtttaaggttttgaagatgtgtttttgtgttttttgaaagttttttagttttttaaatgtaagtttgagattttatttgtttttgaagaaattaaagagatgataggtgatttgttaatgatttattggaagttataggagaatggagggaattatttaggtgatggtgttagagtttgattttttgtttttttttttttttttttttttttttgagatagagttttgttttgttgtttagattcgaatgtagtggtgtagtggtgaatttttagtttattgtaatttttgtcgtttttcgcgtttaagtaattttaatgttttagttttttaagtagttaggattataggtatgtattaatatgtttagttaacgttttgtatttgtatttgtatggggttttgttatgttgtttgggttggtttcgaatttttgagtttaggtaatttgtttgtttcggttttttaaagtgttaggattataggtatgagttattatatttggtttagattttttatttttttgtattttttttttttttagttttttttttttggttgtttttttttttttttttttttttttttttttgatattgttttgttttatcgttaggttggagtgtagtggtatgatttcggtttattgtaattttcgtattataggtttaagtgatttttttgttttagttttttagtagttgggattataggtatatgttattatgtttagttaatttttgtatttttagtagagatagggttttattacgttggttaggatggttttaatttcgatttcgtgatttgtttgtttcggttttttaaagtgttgggattataagcgtgagttattttgttttgttttttgtggttgttttgttgagttatttgtttttgttttttttgttgttttggttttagttttgtaatttatttttagaggtgttggtaagtttgagtttagatttaggaataatggggttgggataggagaaggatgagatagggattagtagttgatgaaaaggaagggtggatatatttatcgtaggggttttaggaattttattattttatatttagtttttttgttatttttgggattaatatagtgttattatcgattagtttttagatttattttagtgaatttgtaaagaataagtatgttttttttattttacgaattttgttgtttagaaagttatttgaaagtgatagtttttaaagtttttagtttgtttttttagagtattatagaaagatttttgaatggagattttgatttttaagtatggaattgttgggaagagttatttggagattattattatatggagggttagtaatattatttttttttttttttatttttattttttttttttaaaaaaaaatatatatatttatataattatttttttgttatttgttgttggtatttagtatgttattgtttttttaattaatgagatatattttttttttttgtatgtttattttaatggttaatttttgatatttttaaatatgtttttgttgttttttttttttatttttatttttattgttttattttagttttggattataataattgtttttttatttttatttgagtatttggttttatttttttgttatatttttagttttttttttgtatggttttagtgatatttttaataaaaaattttgattatagtatttttttatttagttatttttaatgatttttttttattttttgagtaaaatttaaatttttttggaagggtgtttgaggttttttatggttttgtttattgggttggattaaggttatggatgagagatttgtgaggaagaaaaattagttttagagaaataaaggtatggtatttttgtatatttataaatgtaggaagagaaggtttaaaattatttttttagaatatgttttttggttggtgaaaagagtaaagttgattttttatatttttttttttttttaaaattataaattttttttttattttttttttttttgtttttaaattagtatttttaaaagttattttttggtttggtacgatggtttatgtttgtaattttagtattttgggaagttaaggcgggtggattatttgaggttaggagttcgatattattttggttaatatggcgaaatttttatttttattaaatatataaaaattagttggtgcggtggtgtatgtttgtagttttagttatttaggaggttgaggtaggagaattgtttgaatttgggaggtagagattgtagtgagtcgagatcgtatcgttgtattttagtttgagtaatagagttatattttattaaaaaaaaaaaaaaaaagttaggttaggtgcggtagtttatgtttgtaattttagtattttgggaggttgaggcgggtagattacgaggttaggagatcgagattattttagttaaggtggtaaaattttatttttattaaaaatataaaaattagttaggtatggtggcgcgtgtatgtaattttagttattcgggaggttgaggtaggagatttgaattagggagtcgggggttgtagtgaatcgagattacgttattgtattttagtttggttatagagcgagatttcgaattaaaaaaaaaaaaaaaaataaataatagtaataataaaaaagttattttttgattttgtttatttgtgtaatattattttttttttcgttgtagtgaagttgtttgtgtttatttttgtgtttattttcgtttttttagtttttattatttttgaatttttgtagttttttttttttttgttatttaatttatattatttttatggttattagaggttttttttttggttttttttttggtatttgatattatttaagttattatttttttacgtttatatttgtttttttttgttttagaaaattattggatatagtttaggatataattgttttttttgtttttatatatattttatatattttgttttttttataaatttatttagaatttttttaattttttttatatttttaaaatgagttgagtagtttttgaagtaaaaattaagttatagttaagttttatttttattttatttgtgtattttatttttttttttatttttttaaattttttttaaatgatttttgggtttcgagtattatgatttatttagatttgtattttttgggttgtgttttagttttggttatgttagttttttttttttgatgaatttttgtaattatttgagttttattttgttaggtaatagttatagtgaagaagttagtgtgcgttatggtaaagtttaggaagacgtaggtgtgaatttttgttttattattttttgtttgtgtgatttatgttatggggttttattggtttgggttttagttttttattttttagatgatattattttgttgggaggattatatggagtgatatgtataatatatttgataattaagtggttttagttagtggtagttgtttttatttgatatagttttgataagtattaatttttttttaagtttagggtatttgtattttgataataaataagttttaagtaaattaatttatagatattatggaaatttggatttttatattttagttgaggaagggtatttggtatttattgttacgtaggagtttttgggttttaggatattagggaaaagaggttaaataggttttttttttttgatatgatatttagtgatttagttagggtataattgggaaaataatttatattatagggattggttataaaagttttgaatagttaaacgtagaataggatggttaagttgtattatgtagataatagtgatttaggtgggtaggttttatttttttgaggtgttatttgtggatagatttttgtgcgattgtggtataattttgggtttttttttttatgtgtttgtttttaatgggtttaggagaggtaatttaagggagtaagggatttgtagaatgattatgtttttttttttttagttataaggttatgaattatatatttcgggggtgtgattttgaaggaaagaagtgtgtgttatagtaggagaatggaaggtagatagttgttgttattattagagttttagtagttttcgtaatttagttagtttagattaggattttaatatggggtgagatgtattttttaatattgaatagtaaatgatgtaattttgttatttttatgttgattttaaatatttttttgatgaatagtataagaaaataaatgattatttagaggattttgtttggtagttaaaatcgtattaaaatagagagggaagaaattaagtttttttgatggtgaagagattgggaattattattttagtgttagaaaatgttaaatgatagaaggtgggttatattaagtgggaatttttaaattttattttttggaaggaaggaatgtttggtgataagttttagaggagagagatgtttgtttagtttattgtttgtgtgtttaggaagagatgtgtatattttgagatatagagaagattttagtggggagaagttttaggttagtttgttagtatagggtatcggaggtttttaattagttttaagttttgaatagtatatagtttttaaaggtttgtattgttgtttatatttagtagaggttttgtattaggtttttttatgtaaattagtgttttcgtagcgtaggtaaaggagttttagttgtgttttttatgggggaatagatatatcgtgggatattgagagattggaagattgtttaatatttatttattgatttgtgtttattatagaatttaaggtatttattggtattgttttaattagtacgagtgatttttttatttagtggttatttttgtattttattatagatttttgggaattataagatgaaaagggttatatttttattttggtatagtttagaaaatttggttggggaagtagggatatagacgtgattattatattataatttattaagttgtgagaattggaggtgtattagtgattagagtgtatttgagttagaggtagaaggtattgtagataaaaggaataatatgcgttttaggttgtattattaggtataattttttgtttttgggggagtttttttaattttaagataaaaattatgaatatagaaagaggttacggtttatttttgtaatttttttaggagaaaatttgttgtaatttattttttaagtttaaaaaaaaaaagagtaaatgatatgaatattatttgaaagaatttgaggttttaaatttgggaggatttttgaataataattttggggaatgtttaatagtttatatttattttttgatatttatagatggaaattttatagttttatatatatttttttttttttttaattattttatatttatagaaaattagtgtttagtatttttaatagtaggtttagtggaagtttgagattagaatagagttttataaagggaaattgagggtatataaggtagagtagtatttttttatttatggggatttgtttgattggaagtaagggagaagattttattttatagagaattagggaaggttaaaattgtgtgtgtttgtgatatttttgtttttttgggtttagatataggtcggaaattttttgggttttggtgatttaaagtgtggttaaaaggattagtagttttagtttttttgggagaatatatgagtgtagaattttaggtttgtattaagtttttaaacgtttgtattttaataagttgtttttaatttgtttacgtattaaaatttttagaagtattgttttaggattatttttaagtgttatttaaaaatatgtaagatttttttttaaagtaaatttttaagttttattttagagggattgtttttggttttttggggttggtgtaggaatttatattttcggtaagtgttttagatttttgtgtatattagtatttgaggattgttgttttagatggtgggaaatttgagtaggggagggttgtgggttgaaaatgaaatgatgatgtttaggaattggtataagtatgtttttgtttttggtgggaagtagtgggatagatttagttgattgtagagaatgtagatttcgtgttatgtttaagtgttattttaatgtaatggttggagatagttatatatgatttttttattgtttagttagtaagtttaattaatgataggaattattgattttggtaattaaaaatttattgtggtcgggtatagtggtttacgtttgaaattttagtattttgggaggtaaaggtgggtagattatttgaggttaggagtttaagattagtttggttaatatggtgaaattttatttttattaaaaatataaaattagttgggcgtggtggggttgtttataattttagttatttaggaggttaagataggagaaatatttgaatttaggaggtggaggttgtagtaagttgagatcgtattattgtattttagtttgggtaataagagtgaaattgtttaaaaaataaataataataataataataaaaatatttattgttgggtaggtttttataagaggttatgggaaagttatgttttattttagggatatagggttatttgggtttttggttaatagaggttaaataatgggattattttttttgtgaaattttgaaaattaaaaatggtggcgtttttatttgtattagtagaggtaatttgtttttttttgaaatttaaggttacgtttattgtttggggattttgatttagggttagtgtggttttttttttataggagagtcgagttttagaaaggtgaggtggtttgtgttggttattggttattttagattttagagtagttttattttgattgtggggttgatttaattttttttgttgtttttttttttttttaggtgaggaaagaggattttttgtatatttttatttttttgtttttattatttattttttgtggttgttgttgtagaagttattgttgattgatgtggatattttaatttttggtttataaaaagtttaggtgttttttggtttttttttaggttgatagttatggtttttgaaagaaataaaagatgattatttttttaaaaagttttaagtttgaattattagtaatttaattggagaattttattttttttattttcgtattttaattatagttgttttaatatagatttttgaggatttttttatgattttatttataaatatttatttatgttgtatagatgttattaggaaggaaatagggatgtttgttttgattgtggaatttaatttggtttcgttttttcgtgtatgtaattttgtttttgggatagtttttttgagtatatttatttatgtttaagaggtaaattgttttgaaatttttattgttataagtatttattttattatttataatatttaatgtttttaaagttggggtatttttttttttggatatttaaattttattgagatattttgaattatttatagagaaaacggaattttttaatatttggtttttattttttaaaatgttatgattatatatggtttagggttttatggttaaataattttattgaatttaggaaaaagaatagatttatttgaaatagatttgtagtttttagaggtttaaattttcggttttatttgtattttttattttttgtgaggtaaagaagtggaaggagataagttttagttttttttttggtatttttatttttcgtttttttttttggtatggtggaaagtgtattggaggaggagtgaagggttttaggtttgtatttatattttgttatttgttaattttaatggtttttataattgatttatttttatgaaatttggaatgatttttaaagttttttttcgttttgaatgttaatattttttgatagttaggattttttgtagttttattttttttatttagtgttattttttttttaagattgaatagagagggaagttgttaaagtgtgttgggtatatattttgtagtggggtaatggttaattttaattttaagttattaggttgtagtagtatgattattgttttttgtttatttttagagggtagagatagttgagtttttgtagttggggttaggtttagttattttgtggggatagtgattagtgttgtgttattaatttagggaaggagttattttgttttatttttttttttgaattattttgatatgattttattataaatttttttttgtaaatttttgttttttaatttttttttttagtttattttttattgaagtagaggaatagagtataatttttatttttttttattagttttgagagtagaacgtaagcgtcgttattgggaattatatttttggttttttggatgtggttattaatttttggtttgttattttattatatatatatatggagatggtgttatttatgtattttatttcgtatttataatttttattatttaatagtgttaatggttttgatggtttttttgggagggagagaagagtaagttggagttattttttttttgtattttttatttcgttaggtttgttggtgttagtgttttttttgattttggtttgatttttgtgttttgggtattgggttgtaggttggagaggtagtatgatggagtggggataatatatattttaaaattaaatagaagttagatttgggttgggttttggcgaaatagtttagaggtttggtgattttaattttttaattaatttttttaagtataagtttttttattataagttatgtatgataaaattttttttggatgtatttattttagtatgatttgaaattatgtgtgaaggaatttggtttacggaagttgttttgtaaatttagatttatttttttttggatatatggatgatattagtttattatagttatgatttttttaaaatttttaaatattttttaagttttttttttattttttttttagtttgtagttatattttttagtttttatattagttgggatttttatattttttagttggataatattggagaagatattatattttaattgagttttagtgatatgataggtttttaattttttaattttatagaagttagaaaaaaagtagataattaaaatttatagaaaatatagaagattttattaattttgagaatgatttttaggtatttttaggattttaagaaagttgtttttttttgggtttgtagagagtttaagtgttaggaatttattataaagtagtcgggaggtgtagggtagtagggggtatagtgaagtgttgaagggttttttagttttttttaattagagtgagaagaaaagagtatttttttattttagagtatatggtgtgaatttatttttagttgttaagtgagttttattttgggttgttttgtatgtttttttttagtgttttaagttattttgagatgtatagattaatattggttattataaaaatatattcgagtatatagattattgatattataaagtaagtaaataatgaagtttatataatagttaaataataatatgatgataggattaaatttgtatatattaatattaattttgaatgtaaatgagttaaatgttttaattaataggtagagagtggtaagttggatagagaagtaagatttaattgtatgtttttaagagatttattttatatgtagggatattaatagttttaaagtaagggatggagaaagatttattaagtaaatggaaaataaaaaatagtattttttgtttaataaaaatagaatatatattttttttagttgtatatggtatatatttttaaaatcgattataattgttttattggttagaaagtaatttttaataaatttaagaaatttgaaatatcggttaggtgtagtggtttatatttgtaattttaatattttggaaggttgaggtgggtaaattatttgaggttaagagtttgagattagtttggttaatatggtaaaaatttattttttttaaaaaatataaaaattagtcgtgtatggtggtatgcgtttgtaattttagttatttcggaggttgagttacgagaattgtttgaatttgggaggaggaggttgtagtgagttgagattacgttattgtattttagtttggttgatagagtgagatttattttaaaaaaataaaaaaattttgaaatattaattatatttttggattatagtgttataaaaataaatattaagaagattttttaaaattatataattaagtggaaattaatttatttttgaatgatttgggtaaataaagagaaattaaggtagaaattaagaaattgtttataattaatgaaaataaagataaaaatatattagaatttgggatatagttaaagtagtgttaagggaaaattatagtgttaaatgtttatattaaaaagatagattttaatttaatattatatttagaggaattaaataaataagagtaaattaattttaaagttagtagaagagaatatttaaaattagagttgaattgaataaaatggagatgagaaaaatcgtataaaaaattaaagaaagtaaaagttggttttttgaaagaataaataaggttgataggtattaattagattaataaaaaaaggaggggggagataatttaaataaatataattaggaatgataaaggggacgttgttattgattatataaaaatataaaaatcgtttggagattattatgaatatttttgtatataaattagaaaatttagaagaatggataaatttttgggaatatataattttttaagattgaattagaaattgaaattttaaatagattaataataagttttaaaattgaattagtaataaaaagtttattaattagaaaaagttttggattagatggatttatagttaaattttattagatatataaagaagaattggtattatttttatcgaaattattttaaaaaattgagaaagagggatatttttttaatttagtttgtgagattagtattattttgatattagaatttggtagagatataatagaaaaaaagaattttaggttaatatttttgatgaatatatatgtaaaaattttttataaaatattattaaatgaaatttagtaatatattaaaaagttaatttattgtgattaagtaggttttatttttggagtgtagagttggtttaatttatttaaattaataaatgtgatttattatataaagagaattaaaaataaaaattatatgatattttaatagatgtagaaaaggtttttggtaaaattaaatatttatttatgttaaaaatttttaataaattaggtttgaagttatagtttttaaaataataaaagttatttttgataaatttaaagttaatataatattgaattggtaaaagttagaagtattttttttaggaattggaataagataaggatgtttatttttattatttttatttaatatagtattggaagttttatttggagtagttaagtgagagaaagaaataaaaggtatttaaataggaagagaggaagttaaattatttttttttatagataatgattttatatttagaaaattttatggtttttttttgagggtttttagatttgaaaaagaattttagtagagttttaggatataaaataagtttataaaaattagtagtatttttatatattaataatatttaaatcgagaattaagtgaagaatgtagttttatttatagtagttttaagaagaataaaatatttaggaatatagttagttaaagaggtaaataatttttgtaatgagaattttataagatattgtttaaagaaattagattatattaatgggaaaatattttatgtttttggataggaagaattaatattgttgttaaaattgttatattagttaaagtaatttatagatttagtgttaaattattaatgatattttttatagagttaggaaaaaaaatttaaaaatttatatggaattaagaaggagtttaaatagttaaagtaattttgagtaaaaagaataaagttggaggtattatattatttgtttttaaattatgaggttatagtaattaagatagtatggtattggtataaaaatagatatatagattaatggagtagattagagaatttagaaataaagttatatatttaaaattatttgatttttgataaaattgataataataagtaatggggaaagaattttttatttaataaatggtgttgggataattggatagttataggtagaagaatgatattgaatttttatttttcgttatatataaaaattaatttaaagtggattaaagatttaaatgtaaaatttaaaattatgaaaatattagaagaaaatttaggaaatattattttgagtattagttttggtaaagattttatgatgaagattttaaaagtaattgtaataaaattaaaaattgttaaataagttttaattaaattaaagaatttttgtatagaaaatggaattgttaatagagtaaatagtttatagaatgggagaaaatatttgtaaattgtgtatttgataaaggtttaataattagaatttataaggaatttagtaagtaaaaaagaattttattaaaaaatgggtaaaggatatgaatattttttaaaagaaatataagaaaaaaaatgtttaatatttttaattaggggaatgtaaattaaaattataatgagatattattttatattagttagaaaggttattattaaaaaagttaaaaattaattgatgttgatgaggttgtagaaaaaagagaatgtttatatattgtaaatgggaatgtaaattagtttagttattgtggaaagtagtttggaaattttttagagaatttaaaattatcgtttaatttagtaatttttttattgggtatatttttaaaggaatataaatagttttatttaaagatatacgtatatgtatgtttattgcggtattattcgtaatggtaaagatacggaattaatttagatgtttaggttcggtggtttacgtttgtaattttagtattttgggagatcgattcgggtggagttcggcgaggttaggagtttgagattagtttggttaatatggtgaaattttgtttttattaaaaatataaaaattagttggatatggtggtaggtgtttgtaattttagttatttaaggtaggagaatcgtttgaatttgggaagtagaggttgtagtgagtcgagatcgcgttattgtattttagtttaggtgataaggcgagattgttttaaaaaaaaaaaaaaaagaaaatgtatatatatatcgtggaatagaatattatataattacgaagaatgatataatgttttttgtagtagtatggatggagttggaggttattttttaagataattaatgtaggaatagaaaattaaatattgtatgttgttatttttaaatgggagttaaatatcgagtatatatggatataagggagtaatagatattaggatttatttgagggtggagggtgaaaggagggtgaagatttaaaaattattttttgggtattatgttgattatttgggcgataaaattatttgtatatataatttttataatattgtaatttatttatataacgaatttatatatgtattttttgaatttaaaatggaagttgaatagtgaaaaaaaataaaaaaatatatttttaattagggagaaggggattgggtattgtggtttttatttataattttagtattttaggagatttgcggtaggaggattgtttgaggttaggaatttgagattattttagggaatatagtgagattttatttttataaaaattttaaatattagtaggtatggtggtatgcgtttatagttttagttatttaggaagataaggagggaggattatttgagttaggagtttgaggttgtagtgagttgtgattacgttattgtagtttagtttggatgatatagtaaaatcgtgtcgaatgaaaaagagggatgggggtaaaaaattttgttttgagtcggttttgttattagatgaatttattaagagtaatttttgtttggtagatttagagtttattgatggatgttgtcgttgttagattattttaaaaattgtatagtgtggtttagtatagagtatagttttttaaatgaaagaaagttggatttaaattttgattgtgttttttagggtgtagttttgaattaaggatatttttttaatttttgttttgattataagtaaaatgaaggataattagtaatgtgagtatattgaaaaaaatgaaagtattgagtatggtgttggtatttaagagaggtttaataattttttttatttttattttatagaatttttgattttaaagaatatatttatgagtgatttttgatagggaaatatgttgattttgttttaaatatttagtgtttttaaaaaatagtaatatgtttaatagtttatataaattttttttttttgttaggtagaagtgagagtaagagtcgtaatagtaaatatttttttgatttttgaaatgttttaaattttagattataaagattttgttgttacggatcgggatatagttgggggtgttggaaattatatttatttttgtttgagggaaagataggatagtagttaggtgattattagatatttttttttagagttgaagggtttttaagtttgagaggttattattgttattatttgtgttttgtaatgaggtgttagtaggggtgatatgtattttttttggattgggaatttaattgttggtttatgtttttttagagttttttttttgtttattagtagggtattagttggtgttgaagatagtggttgtttggcgagtttggatttttaagtgatttttttagtaatttttgatgaataggtagtatgtaaaagaaatttttttggtttatattagtgagatacgggagttgtatattattgtagtataatttaggttatagatgatgtaatattgttatattagggtttttgatttttagttaggttttatgtttaggatagtttattgttggtatattttttagttagttttttagttttgtatagtattagatatgttaggattttggtttttgatttagagtttttttttggaattttttttatgattagagaatatttttgttttgttttgttgataagaggtattaatttagaaatggttatagttatagtttatataggaaatgtgttgtaaaaaattgagttaatttagagaagagaaaataaaagatgggaagttttagttgtatttaaatttttggttttagttgtatttgaggtgtagttatattattgtttttttagtttgttaaataagataatgaatttttatgttgataaggttaagttagatttttataatttttttaggaataatatagtgtttttatttgtttagatgttatagtttatttaaaaaaattttatttatttagggtttttgttgtttttttttttttttttgagacggagtttcgttttgttgtttaggttggagtgtagtggcgtgattttagtttattagaattttagtttacgggatttaagtgatttttttgttttagtttcgttggtagttgggattataggtatgtattattatatttggttaatttttgtatttttagtagaaatggggttttattgtgttggttaggttagttttaaatttttgattttaggtgatttattcgcgtaagttttttaaagtgttgggattataggtatgaattattatgtttggattattgttatttttagtgttgtgtttagtgatgttttttttatattaagaagtttttaggggatttatatatggattgtgaaattttttagtgatatggaagtttttgtgttatgtagatagagaaattgtgatgtttggatgtttgaggttttttggagtgaggtattatgtatttgtaagtaattgtaaattgtataatttaggattaaaagataaattattgttgtatttagaattgtgtttagaatataataatttgttgttgttttgtaataggattgaagttaatattaaagtaagttaattaaaggttttttggtgtagataagatagtaaaaggatagattattttgtggaatttagtattgttttttttttgtagtattaagtaatatttgtttttcgttaagatttttgtaaattatatataagaattgttggttattttgttaatagatgttgtttatagaattaaattttttgtgttgaattgttatttatgggtttgagagtaggagattggagattaaggtggttagaatttagttgggtttgatgtttttttgttgaaagggttttttgtggaatgaatagtatatggtttttgtggtggatttgatagtggtatagtattaagtgatgtaggtttgttaggggttatagatatagaagatgttttcggggttttttatgtattttagatatattgtaggttattttttttagtaggttgttagttatgggttttattattatgatttttgtttaaggtgtgttcggaaattttttttttaattgtgattttttgataggtggaggatgtggttaggagtgggaaaaggattcgagacgggaagagggaggggtttaggatgaagagagataatttgtgttatagatgttggttttgtagttagtttttatttagttcgtgtatatatattttaatttttttttatttttttatatgttgcggttagagaggttttttttaaagtggaagttttatttttatttttttggttatagtgttgggttatggtaatttataaggtttagtaggaattgtttgcgtattttttttttttgtttattattttgtttttttttagttgcgagagaaaatattgattgagtattaattatgtgttaggtttgttttaagttttttgtatgtatttatttaaataatttttataatatttttattatattttttattttatagtgagggttttaaagtacgtagtgggtgaggaatttgtttagggttatataattaagtgggggtggagaaatattaaatttaggtggtttaggtggtggttagaatttattagtattttattatagttgtttttagtttttcgttttaggaaatatttttttttgttaatttttgttgttttttgggtttagttgatatgttatttttttgaggaggatattttgagatgtttttcgattagggtgggtatttatttttatattttaaatgtttatttgatttgtgtatcgttgtatttttattgtttggtagatagtaggtttttaataaatatgatttgagtaaataaatatagttttttaaaaaatagggaggattttttgttttaggtaatggtaggttaggatatttggattaatttttttgtagaaaatagttatttattttgatgtaatatatttggttatgattagagattttaaatatttggagggttattatgtgaagaattaaatttattttttgtgatatagaggttagaaattggtcgtttttatagagtatgagagagatagaattgtgtttattataagtattttttttaaaagttagatttaataaaatgggttgttttggtaggtggtgagttttttgttacgaaagagatttagttatttgttttgagaaagtatggagaatattaatattgtaagggtcgattattttatttttgaggttttttttttatttaggttgttattgtaggtggaatattgggttgagtgttaaagaatttgggttttataagttgtgcgattatggttggttgttttggattttatttttaatatttgttagttaagttgattcgttaatattgatttattttatagagttatgaagggattaaattaggtattatatgtaaatttgttttgtttgttttttgttgtttttttttgttttgtttttttttttgtattatgaaattttaagttaattttttttatttttttatttttttaaaaattgatattattattataattataaaataatttttaaaatggaaaaaaaaaatttatttgtaattttataatttaatataataattatatttttttttttttatttttttttattgtgattaaggatgattttgggtattgttgtgaggaattatttcgtttaatattttattatttgaatatgatgcgtatttagttttttattattttttaagtagttatatatgatgtgataatagtattggtggtggttttagagagttggagagaaaattgaagttggatttgggtaaaagaaaaaagagtgggaattattttttttttattttaaagtttataaagtaatgttaattgtttttatttttttgttattttgtttttttaggtattgtgtgtagaaatgtgattgagatttaagttagggtttttttgtttttttttttttagaaataaaattaagataatttattttgaatacggtgaaaaaaggaagggagggaggagaaaaagttcgggttttatttgggattttttgttttttgtaatatgaaggatttagtttgggaggaggtggtgagaattttgggagagaaaaaagaaggaaagaatagttttatttatgttgaagttaatttaaatttttatttagagaagtaaaaaaaaaaaatttatatttttttattttgtgtttttttttttagagttttagttaaaggtttagttaagtaattggttttattagcgtatttattttttttattttaagtttgtttgattttttttttattattttttttatttttttttaggtagggtggggatagtagtaggaggagattttgggagtttggtaatttttgtaaggatcgtaggatagtttttttgtggggatgcgtggtgttttatttgtcgtttttttgaagaatgtattgtttttattttttattgtgttagagtttatttagattgttttatttaaaaaagttttttttttttttataggtaattaggaaatgatttttttttcgattgtttttgtttagtgtttgggaattttgagttaattttttagtaagttagtgattagggaaatttttttttgagttttttagtttatgttgtttagggaatttgatattttcgtgaaatttgtttatatatgggtagtttaatagtagaataaatggtggtgattaaagtgaataaagaagtatagttgtgttagtttcgtagttgtttatgtggataagttagtaggattaggatacgaggaagagtaaatgtgagatagttaatgtgatttttgcgataaatagatttttaaatttcgaaattttgtaaaattttggtgaaatttgaatttttttcgttgtatatattggtattatttgtattattatataattgttttatattaaagttattttttttgggtattgatgagtaaggttggtataagttttttagattaataaaaatttatttttttgtaagttttatatttagtatttaaggaattaaaatttaaatatattttgtgaaatggttgatattttattgataatgatttattgtttggattaataaattttttaaaagttgttttatgtagaatatggtttgtaattagtagaattattaatttatattgtaatgatatgtattatgtataattgtttaaaagtttttatttaatgatgtaaaatgttttatttaattatatatttgggtaaattgtatattaatatttgatggtatttttttattgtttgttgttttttttaaatattttattgtataaagttgtttttaatattttttaagtttttttttttgaattttgttaatgttttttttgaattatgagtattgatagaatgtgtttagtatttttggttatttatatagtttttgagtatgatttgtatttaatatttatattgttagtaataataagttatttgtgagttttgttaaaagttattggggattttttaaattttagaaatgtaaattattgtttttttgaattaatttttatgtagttgtaaaggtatttttagttgttatagtttgtgtataatattaggtgttttagattatgatttattattaatattattgtttttttgttttttttgaggtttagaagatttatgtttataatatttagaaataatgttaaaaaggtatttaaagtttgttattttattattagtttgtttttaatattttgtttaagtttttgaatttatagatattaaaacgttgtataattatgatttttataggaataataatatattaataataagaattaaaaatagtaaataggttgtttataagttttgataatattaggataatgataatgatagtttttttaaattttatagtaaagaatgtagtaatttagtaatattgttatttgtggttttaggttgtagtgttagtttttttttgggtttttagtttgttagtttaatttgaaaattatgtatttgttagtttttatagttacgtgagtgaattggtttaggttgtttattagggttagtttttttgtgtgttattaatttatttagtttttagtagtttttttggagttgagatgtatttattatttgttttttgggtgtttagggtggagaattagaaaagtataatttagtgtgtatttttaaagagttaataatatggggtggtatttataggtttggaaatattttattgattttgtgaggtatattaggagacgttagagaatagtttttttttaaatgttaaatgagatgtagaagaaatagtttgtttaagtttatgggttagatattttagtggttagggagttttatgaatgagatggaattttgtatggaattcgagggatgtgtatgatttgagtagatgaagaatatgagattttttaagtagttagaagttagggagtagtaagatgtgtggtgggattgagtatagttggtttagaggatagattgtagttttaataatttgtagtaaatattttttaattgtttggtattattggagtaagtttttgaatgttaaatgaaggtataaattagtaagaggtataataaaaggttgagtagtgtttggttttttacgaattgattttgataggagtagttgtttaataaagttgttaggttatcgttatatagtttttgttttttaggggtttattgtttattgggagagatagtttgaaagttggtggagtatgtaattgttggatgaggagtttgagtttgtggattgtgggattttcgaggagggtgtggttattttaggtagaataattttatagtttatttatatttaattttgaaatttattagaggattttttagtagaggtttggtatttgttaatgttaaggtttgtattttttagaattttaaggaaagttgtatcgtgtataatgtatttttttatgttaatgttgtgtattgtgattttgttttagggatttgtatttaggaatttgttatagtgagtatagaagtagatttgtgggtttatagtttttattttttatttatatatataagatgaatagagtggaggttaaataatttgattaaataatatagtttatggtaaagtttaagattgtatttgtttatttattgttttttttatgtattttggaattgagtatagatttttttttaggtagagttgatagtaagtaaaggagattataattaggggattaaataattttgtttaaagtgtgaatgttatttaaggagaagttgtgagattagaagggtggggtagaggagtagatattatgagagagagtttttgggggtatatttgttagattgatattgtttggtttgggtagtggaggggttagtaggaattataggtattggtggtgtggttattatcgttataattgtttgtgtttggatatggattttttgtaatatgcggtagttttatttattgttttttatattttatattaagtagaaatggaaggtaattggatattttatagataagatttaagtggagaaggaatgcgttttgtggttgtagagatttttggagtttggaggggagagtttgagttttattgatgatgattttttatagttcgttaatttagttttttttaagtttttatcgggggttaatttttattttggggttggggggattttattatagtttatttattatagggatgttggtatttattgtgggttgggtagggtcgatgtgttgaggatggtttttttataagtaagagatgtggatttggggagttttttattttgtgttgaaggaatataatttagaataataagagttaattataataaatttatagttaatattatattgaatgggtaaaagttgtaggtattttttttgaaaagtggtataggataaggaagtttttttttattatttttatttaatatagtgttgaaagttttgattatagtagttaggtaatagaaataataaagggtatttaaataggaagagaggaagttaaattatttttgtttgtagatagtatgattttatatttagaaaattttatagttttagtttaaaaggttttttatttgataattttagtaaagttttaggagataaaattagtgtataaaaattattaatatttttatatatagtcgttaagttaagagttaaattaggagtataattttatttataattgttataaaaaagaataaaatatttaggaatgtagttaattaaggaagtaaaggatttttataatgagaattataaacgttgtttaaagaaattagagatgatataaataaatggaaaaattttttatgtttatggttaggaagaattaatattattaaagtggttatattatttaaagtaatttatagatttaatgttatttttattaaattattaattatattttttatagaattagaaaaaatttaaaatttatatggaattaaaaagtttgagtagttaaggtaattttaaataaaaagaataaaggtggaggtattatattatttaattttaaattatagggttattatgattaaaatagtatggtattggtataaaagtagatatatagattagtgggatagaatagagagtttaaaaataaggttataaatttatagttatttgatttttaataaagttgataaaaataagtaatggggaaaggtttttttatttaataaatggtgttgggataattggttggttatatgtagaagatcgtaattggattttttttattatgtataaaaattaagatggtttaaagagttaaaatttaaaattataaaaattttgaagataatttaggtaatattattttggatataggaattggtaaatattttatgatgaagatattaaaagtaattgtaataaaagtaaaaatggataaattggatttaagagtttttttatagtaaaataaataatagggtagataatttattaaatgatagaaaatttttgtaaattatgtatttgataaggggttaatatttagtatttataaggaatttaaatatagttataggaaaaaaaaaatttattttattaaaaaatgggtaaaggatatgaatagatattttttaaaaaagatatatatatagttaattagcgtgttaaagaaaattttaattattattgattattagagaaatgtaaaattaaaattatgatgagatattatttgttagttaggatggttataaaaaagtaaaaaaataatagatgttggtgaggttatggagaaaaggaatttatatatttgttaggagtgtaaattagtttaattattgtggatagtagtgtggtgattttttagagagttaaaaatagaattattatttgatttattaattttattattggatatttatttaaaggaatataaattattttattataaagatatatgtaagtgtatgtttattgtagtattattaatagtaataaagttgggtatagtggtttattttacgattgtaattttagtattttgggaggttgaggtaggcggattatttgaggtcggtagtttgagattagtttgattaatatggagagattttatttttattaaaaatataaaattagttaggtgtggtggtttatgtttgtaattttagttatttgggaggttaaggtaggagaattgtttgaatttaggaggtagaggttgtagtgagtcgagattatattattgtattttagtttggtgaaggagtaagattttattttaaaaaaaaaaaaaaaaaaaaagaaagaaagaaaaatatatatttagaggagataaaaaataaaaaataatgatgtatgtttataggatttagaaaataattttttaagggtaaatttaggagttattggttttaaagaagagatagagaaagagataggaatagaaagtttgttgaaagggataataatatagaattttttaaatttatagaaagatatttatatttaagtataagaaggttatagaatattaggttaatttaatttaaagattattttaaggtatttaataattaaatttttataggataagggtaaagaaaggattttaaaagtagtaagagaaaagaaatagataatatataatggagttttaatatatttggtagtatattttttagtggaaattttataagttaggagagagtgatatgatatatgttaaagtgttgaagggaaaaaattttttattttagaatagtatatttagtaaaaatattttttaaatatgaagaataaataaagatttttttagataaataaaagttgagggattttattaatattagattggttttataagaaacgtttaagggagtattttggttagaaagaaatagatattaatgagtaataaagaattatttaaaggtaaaaaatttattgttaagagtaagtatatagaaaaatttaaagtgtgataatattgtaattgtggtgtgtaagtagaaagaataaatgataaattaattaaaaatagtaattataattttttaagattagttagaaaaataagataaaattagaaataataaaaagttaaaaagtggggggatgaagttaagatgtagagtttttattagttttttgtttgttaatgtaaatagtgttattaggttaaaataatgggttataaaatagtatttgtaatttttatggtaattttaaatttaaaaatatatattggatatataaaaaataaaaagtaaaaatttaaattatattattagagtaaattattttttttaaaggaagataggaagaaaagaaagaagaagattataaaataattagaaaataaataaataataaggtaggagtaagtttttatttatcgataatatattgaatggaaatatggattaaattttttaattaaaagatatagattggttgaatgaatggagaaaataagatttattgatttgttgtttataagaaatatatttaaattataaagatatatataggttgaaagtaaagagttggaaagagttattttatgttaatggaaattaggaaaaagagaaggagtattgattttgatataaaaattatgagataaataaagttattatataatgataaaggggttaatatggtttttatttgtgttttatttaaatttcgtgttttattgtaatttttaatgttggaggtggggtttggtgggacgtgattagattatgggggtggattttttatgattaatttagtattatttttttagtgttgtttttatgatagtgagtttttttgaaatttggttgtttaaaagtgtgtagtatttttttatattattcgtttgttttggtttatttttgttatgtagatgtttgtttttattttgtattattttatgagtaaaagtttttttaggtttttttagaattagatgtcgttatgttttttgaatagtttgtggaattatgagttaatttaattttttttttttataaattaataagttttgggtatttttttatagtagtgtgagaatagaataatatagaaaattggtaaagaggagtgaggtattgttagaaagatatttgaaaatgtggaaatagtagtggaattgggaaatagatagaggttggaagagtgtggagggtttcgaagataggaagatgaggggaagtttggaattttttagagatttgttaaattgttttgattaaaatattgatagtgatatggataatgaagtttaggttgaggaggttttagatggagatgagggatttattgggatttggagtgaaggttatttttgttaggatattgtggttggagatattgtgtttttgttttaggaatttgtggaattttgaatttgagagcgaagatttagggtatttggtagaagaaatttttaagtagtaaagcgtttaagacgtggtttggttgtttttggtagtttgtgtttatatttgtgagtaaagatatgataagaaattggaatttatatttaaaaaggaagtagagtgtaaaagtttggagaatttgtagtttggttatgttgtagaaaagaaaaaaattattttttggagaggaatttaagttagttgtagaaaattgtaagtaataaggagtaaaatgttgatagttaagatagtgggaaaaatattttgaaggtattttagatattttgggggtagttttttttattataggtttaaaggtttaggagggaaggatggttttttgggttaggtttagggttttgttgttttgtataattttaggaaattgttttttaaattttagttgttttagttttagttttagtttaaagggttttaggtatagtttaggttgttgttttataggatgtaagttataagttttagtggttttcgtgtggtgttaaattaagtttgtaggtgtatagagtgtaagaattgaggtttgggagtttttaattagattttagagtatgtgtgggaaagtttggatgtttaggtagaagttagttgtagggatagagtttttatggagaatttttattagggtagtgtggaggggaaatttggggttggagtttttatatagttttttttttggtgtattgtttagtggagttgtgagaagatagttattgttttttagattttaggatgatagatttgttaatgatagtttgtattgtataattggaaaagttataggtagttaatgttagttcgtgaaagtagtgatagtggtttattttgtaaagttttaggggttgagttgtttaaggttttgggagtttattttttgtattagtgtgttttggatgtgagatatggagttaaaggagagtattttggagttttaagatttaatgattatttgttgggttttagatttgtatgggtttagtagttttttttttttggttaattttttatttttggaatgggagtgtttatttaatttttgtatttttattgtatgttggaagtaattaattgtttttttattttgtaagtttataggtgggagagatttgttttgttttaggttgagattttggattttggatttttgaattaatgttggaatgagttaagattttgagggattgttgggaagatataattgtattttgtagtatgagaaggatatgagatttgggagatattagaggtggaataatatgatttggatttgtatttttattaaaattttatgtttaattgtaattttaaattttggaggttgagtttggtggaagaggattggataatgggggtggttttttatggtttaatattatttttttgggtgttgtttttatgatagtgagtgagttattgtgagatttgattgtttaaaagtgtgtgttatttttttttattttttttttgttttagttatgtaagataggtttgttttttttttattttttgttatgattgtaagtgttttgaggtttttttagttatgttttttgtatagtttgtagaattgtgagttaattaaattttttttttttatatattatttagtttcgggtatttttttatagtagtgtaagaatagattaatatagggtttaatttagtaagaggatataataaatataaatatatatgtatttaatattgtagtatttagatatataaagtaaatacgattagagttaaagagagagagtgattttaatataataatagttggagattttaatattatatttttagtattggatagattttttagatagaaaataaaaaagaaatattagatttaatttgtattgtagattaaatggatttaatatatatttgtagaatattttatttaatggttgtagaatatatatttttttttagtatatgtattatttttaaggatagattatatgttaggttataagttttaaaatattaaaaaagttgaatattattaagtattttttttgattatagtggaatataattagaaattaataataagaggaatttttgaaattataaatatatgaaaattaaataatatgtttttgaatgattattgagttaatgaagaaattaagaaggaaattgaataattttttgaaataaatgataaaggaaatataatatattaaaatttatgggatacggtaaaagtagtattaagaggtaaattgatagttataagtgtttatatgaaaaaagaggaaaaattttaaataagtaatttaataatgaattttaattagaaaagtaagagtaaaataaatataaaattagaagaaaataaataataaaaattagagtataaataaataaaattgaaataaaaattaatgtaaaagaataatgaaataaaaagttgtttttttttaaaagttaaataaaattgataagtttttagtaagattgagaaaaaagagataagatataaattagaaatgaaaaagatattataattgatattgtagaaatttaaaggattattaggggttattatgagtaattttatgttaataaattggaaaatttagaagaaattgataatttttagatatatataatttattgagattggattaggaagaaatttaaaatttgaatagattaataataagtaataaggttgaagttataataaaaagttttttattaaagaaaattaaggattcgatggttttattgttgaattttattaaatatttaaagaagaattaatattaattttatttaagttattgaaaaatagaggaggagagaatatttttaaagttattttaggagattagtattattttgatattaaaattagataaagatatattaaaaaaagaaaattgttggttaatttttttgatgaatattgatgttagaatttttagtaaaatattagtaaattaaatttaataatatattaaaaagattatttattagggtcgggtgtagtggtttaagtttttaattttagtattttgggaggtcgaggtgggtagattatttgaggttaggagtttaagattagtttgattaatatggtgaaatttcgtttttattgaaaatataaaattagtcgagtgtggtggtgtatgtttgtaattttagttatttaggagattgaggtaggagaattatttgaatttaggaggtggaggttgtagtgagttgagattgtggtattgtattttagttttggtgatagagtgagattttattaaaaaaaaaattatttattatgattaagtgggatttatttttggaatgtaaggatggtttaatatatgtaaattaattaatgtaatatattatattaaaaagaatgattaaaattatatgattatttttattgatgttgaaaaagtagtttataaaatttaatatttttttatgataaaaatttttaaaaaattgtataaaagaaatatattttaacgtaatagttagatatgatagatttatagttagtattatattgaatggggaaaaagtgaaagatttttttataagatttggaatataatagggatgtttattgttattattgttatttaataaagtattggatgttttagttagagcgattagataagagaagatataaaggttatttaaattggaaagggagaagttaaattattttagtttgtagatgatatgaatttatatttggaaaaaatttaaaggttttataggaaaattattagaattaataaatttagtaaagttgtaggatataaaattaatatataaaaattagtagtatttttatatgttaatagtgaataatttgaaaaattttaaatttaagaaggtaattttatttatagtagttatatataaaattaaatatttaggaattaattaaaaatgtgtaagatatttatgaggagaattataaaatattgatgaaagaaattgaagaggatataaaaaaaatggaaaaaattttatttttatggattggaagaattaatattgttaaaatgtttatattatttaaagtaatttatagatttaatgtaatttttattaaaatattaataatagtttttagagaaatagaaaaaaaaattttaaaatttatatgaaaatatagaatgtttagaatagttaaaattatattaagtaaaaagattaaaattggaggaattatattatttgattttaaattatgttatagagttataattattaaaatagtatggtattgatataaaaatagatatatagtttaatagaatagaatagagaatttagaaataaatttatatatttatagggaatttatttttgatagagttgttaagtatttatattggagaaaagaaaagatagtttttttaatgaaatggtgttgggaaaattggatatttatatgtagaagaatgaaattagatttttattttttattgtagataaaagttaaattaaggttaggtatggtggtttatatttgtaattttagtattttgggaggttgaggtaggcgtattacgaggtgaagagattgagattattttgattaatatggtgaaatttatttttttttatttattaaaaatataaaaattagttgggcgtgatggtatgtgtttgtagttttagttatttaggaggttggggtaggagaatcgtttgaatttaggaggtggaggttgtagtgagttgagattgtgttattgtattttagtttggcgatagagtaagattttattttaaaaaataaaaaataaatttaaaatgtaataaagatttaaatttaagattttaaatatgaaattattataagaaaatattggggaaaatttttaggatagtagtttggttaaaaattttttgagtaatattttataagtataggtaattaaaataaaattggataaatagtattatattaagtttaaaagtttttataaagtaaaggatataattaataaagagataatttatagaatgggagaaaatatttgtaaattatttatttgataaagaaataataattagagtatataagaagtttaaataattttatagtaaaaaaaaaaaaaaaaaaaattttaaaagtttaagtaaaaaaatgggtaaaagatttgaatagatattttttaaaagaagatatataggttatgcgtggtggtttatgtttgtaattttagtattttgggaggtttaggcgggtggattatttgaggttaggagttcgagattagtttgattaatattgtgaaatttcgtttttattaaaaatataaaaataagttaggtatggtggcgtatatttgtaattttagttatttaggaggttgaggtaggagaatcgtttaaatttgggagatagaggttgtagtaagtcgagattatattattgtattttagtttgggtaataaagtgagatttcgttttataaaaaaaaaaaaaaaaaaaaaaaaaagaaaaaggaagaagatatataaagttaggtatagtggtttatgtttttaattttagtattttaggaggttaaggtagatggaattgagtttagaagtttgagattagattgagtaatatggttaaattttaattttgtaaaatataaaaataaaaaatagttgggagtggtggtgtatatttgtagttttagttatttaggaagttgagatgggaggattatttgagtttgtagtgaattataattgtattaatgtattttagtttgggcgatagagtgagagatattgttttaaaaaaaagaaaaagaaaaaaaagaaaggatataaaaatgataaataggtatatgaaaaggtgttgatgattattgatttttagagaaatgtaaattaaaattgtaatgagatataattttattttagttaaaatggtttatatttaaaagataggtaataataaatgttggtgaggatgtggataaaagggaattttcgtatattgttgatgggaatgtaaattagtataattattatggataatagtttagaggttttttagaaaattaaaaattgagttgcgatatgatgtaataattttattgttgggtatatattttataaaagataaaattagcgttttgtatggtggtttatatttgtaattttagtattatgggaggtcgaggagggtagattatttgagtttagaagtttaagattagttcgagtaatatggtaaaatttgatttttataaaatataaaaaaaaaattaggtagttgtagtggtttatatttatagttttagttattgtggaggttgaggtaggattatttgaatttaggaggtggaggttgtagtgagttaagattatgttattgtattttagtttgggtgataaagtgtgattttgttttaaaaaagaaaattagtatatggaagagatatttgtatttttatgttttttataatattgtttataatagttaagatttggaagtaatttaaatgtttaatagtagatgaatggataaggaaaatttggtatgtatatataatgaagtattatttagttataaaaaggaatgagatttagttatttgtaatagtatggatggaagtggagattattatgttaaatgaaataagttaggtatagaaaggtaaatatggtatgtttttatttatttgtgggatttaaatttaaaataattgaattaatggatataaagagtagaagaatggttattagaggttaggaatggtagtggggggttgaagggaaggtggggatgtttaatcggtaaaaaaaaatttagaagaataagatttattatttgatagtataatagggggattatagttaataatgtatatttaaaaatagtgtaattgaatggtttgtaatttaaaggataaatgtttgagggaatggatattttattttttatgatgtgtttattttatattgtatatttgtattaaaatattttatgtattttataaatatatgtagttattatgtatttataaaaattgaaaattaaaaataaaatattttttaaaatgtattattatttgttttttgtgaataaaattcgtttttggtttttttttttataggtatttaaaagaatgtatttaggtagattaatggtattatataatatataaaaataataaattttttttttttaaatatattatatttagtatagttgttgaagttggggttaattataggttatatttttattaatttattgttatttgttattatttatttaatttttgttagaattggagtggtaaatttaatagttgatgatgaaattataatttttgtattttttatgtttttgagtgatagtttattttattgttttttaaatattatattgttttaaaatttttattttggtcgatattagaagtttttttaggggtatttatttggttttttttattataaattttttattttataggtgaaatgattaaagtgtgagtgaaataattaatgtataaaataaatttattaattatatatttggaaattagaaaaataattattaagtagatgtgtggatatagagaatttacggagatacgggtggatttgagataggaaattatttttagttttttgtgtggtttttttttaatagaagtttatgagggtgttttggttttttaggtattagtgtgaaattggattttgtatttaatagatttgaaaatatttggatatttttttttattagtgttttgatatttgagtaaatggttattgatttttttagggaagggtgtagaaagtgtttattgtatatatttatggtgttgtagatattttattaggggacgtgatttttttttaatgaatggattttggatttaagtattggtttaggtttggaaattgggtaagggattttaaatttttattggagaaattaattttagattttagtttatttattttttatttattgattttaatattaaataatagttttataggttgtttaattagaaatattatagttttaataatttttttaaattttttgtagttaggattttttggtttttattttaatattatttattattttggggattttgtttattttgattttgttttgttgttagttggtttttagttttttggaattttattgttttattgttgttagggtattaagttttttaatattattttatagagttagttttagtttataaaggataaaattaggttaatatttcgtttatttgtttatgatttgttgtttgataaatagagttttttttgggtttttttaaataaatagttatttagtgtatgatttagttttatagagtgtatttatttatgttagtatgtttattgttttgagttttttggtttttttttttataatttgttatggtagttttggtatatcgattttattttatgtgagttattattttttattagaatagttttattaagataaaatttatatattatttaattatttaaatttaatggtttttagtatatttatagtgtaattattattataattaattgtagaatatgtttattattttaaaattatttttagaatatttttattatttatgtatatttatttttaggtagttatttttatttttttttttaatatttttttagttttaggtaattattaatttattttttttttataaatttattttttatagatattttatataaatgaaataatataatggatggttttttgtgattggcgttttttatatagtataatgtttttaaggtttatttatattgtagtatttattagtattgtatttttttttatggttaaatatttcgttttatagattgattatattttatttatttatttgtttttgggtatttgtattgtttttattttttagttattgagaataatgttgtttgattattatgtataaatttttgtatggatatgtttttattttttttgggtatatatttgggaatggaattgttgggttaaatatttattttatatttaaattttgaggaattgttagattattttttaagaggttgtattattttatatttttattagtagtgtgtaagaattttaatttttttatatttttattattgtttattgatatttgttttatttattttagttattttagtgatcgtgtaggggtatattattgtgtttttaatttgtatttttttgatgattaatagtgttaagtatttttttatatttttattagttatttttttattttttgtggagaagtatttatttagttttttgtttattttttatttgtattatttgttttttaatttttgatttgtaagagtttgtgtgttttatatattaatttttttttatatataagatttatatatatttttttttagtttgagggtggtatttttatttttttgattgtattttttggaatatagagttttaaattttgttgagatagaatttatttgtttggtttattgttatttgtgttttggtgttatatttaaaaaatattgtttaattcgaggttatgaaggtttttgtatatatttttgtttgtaagttttatagttttagtattaatatttaggtttttggtttatgttaagttatttatgtatatgatatgaggtagggttaaattttatttttttgtaggtggatatatagttatattagtataattttttttaattattggttattttatatttaaaaaatatttaattgataaagttgtgtatggtatatattatgataatttaatatatatatatattgtatgattattattgtaattaaattaataaatttattattgtttatattgaatattagatttttagaatttgtttattatataattgagaatttgtattttttgattaatatttttttattttttttatttaagtttttggtaattatcgttttatttttgtttttaggagttttatttgttttagattgtaaatatgaggttatataatatttgtttttttgtgtttggtttattttatttaatataatattttttaggtttatttatgttgttgtaaatgttagtattttttttttttgtggttattattttattttgtgtgtgtgtgtatatatatatattatattgttatggtttgaatttttgttttttttaaaatttatgttgttttaatttatttatattttaatatgggttgaagtatatatatatttgtagagatggggttttattatgttgtttaggttggttttgaatttttggatttaagtagtttttttattttagttttttaaagtgttgggattataggagtgagttattgtatttagttgtatattgaaatttaattgttattgtaatattattaggaggtgagatttttgagaggtgattggattatgagggttttatttttgggggtggttttaatgtttttataaaagggtttttaggagtgtgttttttgtattttatttgtttttttatttttagttatgtgatgatgtagtaagatggtttttattattagttagtgttttgattttggatttatagttttttgaatcgagagaaaatatatttttatttgttatagattatttagtttgtgatattgtgttatagtagtataaaatagagtaaaatatatgtttaatttatttattagttgatagatatttaggttatttttaggaaataatgttgtgataaatatatgggtgtaaatatttttttgagatattgattttattttttttggatatatgtttagaagtaaaattgttggattatatattggtagttttgtttttaatttttttaaggaaagatcgttttaattttttgaggaaaaattatattgttttttataatgtttatattaatttatatttttattaattatgtataaggatttttttttttttatatttttattaatatttattattttttatttttttgataataattattttgataggtgtgaggtaatattttattgtaattttgatttgtatttttttgattagttacgtttagtattattttatatatttgttggttatttgtatgttttttttggaaagatgtttatttaggttttttgtttatttttgaattaggttatttgttttattgttattgagttgtgtataatttttcgaaaagattttttttttttttattgaattgttttggtagtatttttgaaatttaattgattataattataaatttttatttttagtttttttattttattgatttgtatgtttatttttatgttagtattattttgtattgattattgtagttttgtagtaatttttgttatgagtaagtatagttttttaaattttgttttttgttaaaagttttgtaatttttgtagtttattgaatttttatataaattttaatattattttgttagtttttgtaaagtagttagttgggattttgatagaattgtattgaatttgtagattaattttgatatattgttattttaataatattgttttttgatttataaaaatagaatatttttttatttatttagttttttgatttttgtaaaaatattgtcggtttttttgtagtataaatttcgtattttttttattatatttatttttaagtattttatttttttttagttttattgaagtataattgataaataagaattatatatatttaagttgtataatatgatttttaaaatgtatatatattgtgaaatgattattataattaagttaattaatatatttatgatatatagttaatatttttgtgtgtggtgagaatatttaagatttatttttttagtaaattttaagtatattaatagttgttattttgttgtaagtttaaattattttggtttagtgattttggggatttgagattatttttttttttatattgtatattaggtttttagaatttatttattttataattgtaagttggtaaatttttattaatatttttttattttttttaattatgatttttagtaatttttaaaaaaaaaaaaaaaaaaaaaaaaaaaaaaaaaaattttattaattttagataaattaaatttagaagagtttatttaagtaaaaaataatttataaatttggtagtatttagaattaggagagggttagaaagttttatttaggagtgtgtatagtaagtttttatgtgttagatatagaagaagaaaaattatttgattggttatagttaggtatttgttttatttgggtatggtgtgatgagttggttgtttgtgattgggtgaattttagttaatagttatatttttaatttaggttttgatttgtttatttatttatttaggtatataggtagttttaggttaaagttaagttaatttaattgattgtttttatttttgtttttttgaattttattttatagattatatatataaatgagattatatagtatttttatttttgtgtttgttttattttatttagtataatgttttttagatttatttatgttgttataaatggtagtattttttttttttttatgtttgaataatattcgtgtgtgtgtgtatgtgtgtgtattataatgtttttatttatttattaattaataaatatttattttgtttttatattttggttattgtgaatagtgttgtaattaatatgggggtatagaaatttttttattgattttattttttatatatgtttagaagtaggattattgtattatatggtagttatgtttttaattttttgaagaatatttatattgtattttattatgtttttattaatttatatttttattaattatgtataagggttttttttttttatagtttattaatattgattattttttgtttttttgttaatggttatttttattgatgtaaggtgatatgttaatgtagttttgatttgtagttttttgatgattaatgatgttgagtatttttttatatattttttggttatttgtatgttttttttgaaaaatgtttattcgggttttttgtttatatttgaattgggttatttgttttttgttattaagttttatggagtttatagattttatatattaatttattagtgaatataaggtttgtaaatatttttttttattttgtggtttgtttttttattttgtttattgttgtgttgttgtgtaaaaattttaatgtagttttatttgtttaattttgtttttttggtatatgtttttgaggtaatatttttaaaaaaattattgttaaggttaatgtttcggagttttttatttgtttttttttttaagttttgtggttttaggttttatatttatatttttaatttattcggagttgattttgtatatggtgtaagatcgggatgtagttttatttttttttatgtggatatttagtttttttattattatatatgtaggagagtattttttttttattatatattattgatatttttttaaagattagttaattgtatatgtatggatttatttttgagttttttgttttattttattattttatgtgttgtttttatgttagtattatattgtttttattaatatagttttgtagtattatgttaaattaggaagtgtgatgtttttagttttgtttttgttgaagattgttttagttattgtagtttttttgtggttttatacgatttttgagattgtttaatttagttaaaaattttattggaattttgataggggttatattaaatttgttgattgttttgggtagtatggatattttcgtaatatgatttttttgatttaagaataaggatatttttttaattatttgtggtttttttaattttttttgttattgttatggtttttagtgtgtagattttttagttttttgattaaatttatttttaatttattttttttgatattgttataattgagattatttttttgattttttttttagatagtttttggtaagtatataaaagtattattaatttttgtatgttgattttgtatgttgtaattttattgatttttttttttagtgttagtagtattttggtggagtgtttggggtttttatatataagattttgtgatttataaatagaggtaatttgatttttttttttttagtttagatttttttttttttttttttttaattattttgtttagaattattagtataatgttgaatagatgtggttagagtgggtattattgttttgtttttgattttataggaaaagtatgtaattttcgttattgagtatgatgttagttgtgagtttgttatagtttttattttggtaagatatattttttttatatttaagttttttaaagtgttaggattataggtttgagttatcgtatttggtttagaaagtttttatttttatgtttttaaagttattgtttaatttatagtataaagtttattattaattttattttatatttagtgtattttatgtttgatatttttatttttggaagtttgattttgatgttttatgtattttttatgtttttgtgtaattttttgaatatatggaatatatttataataatcgttttatgttattgtttgttaattttgatatttatgttagttttaggtaattttagattgatggttttttttgttttttgagttgtatttttttgtttttattatatgtttggtgattgtttttatttaatgttagatatgattttattaggttaggtgttagatatttttgtattttataagtatttatgagttttattattattattattattttgagatagagttttttttttgttgtttggagtgtaatggtgagaatttggtttattgtaatttttgttttttgggtttaagtaatttttttgttttagtttttcgagtagttgggattataggtatgcgttattatgtttagttaattttgtatttttagtagagacgggatttttttatgttggttaggttggtttcgaatttttaattttaggtgatttgtttattttggttttttaaagtgttaggattataggtatgagttatcgtgttcggttgagttttttatttttattgggataaattaagttatttaggagttgtttgattattttaagttttttaatattttttagtaaaaaaataaaaagtgtttagtttagggttaattatttattattgttgatataagattttttagaatattttatttaatgtttagtaaattatgaggttttttagtttggttagtgggaataggtattatttttagttttgtatattattgggtattattttttgaagttttttcggataattttttttttgtttttgggtagtttttttatataatatgttgattaattgaaaatttgaggggtattttttgtagatttatagtgttttttattattagttgttttttttatgtgtttttatttttgtatattttggatgttttggaatttttaagtttataattttgtttttttattttagtgaattttttggttagggttttgtttttttgtattttgttttggaaattttgtttaggaaggaagttggataattgtagattttattttttttatttttttttttttagagattatagtttttgggatatttgttgtttagtatttgagtatatagttatttttttatatattattttgagtttgttgtgtttaaggtatgagagtaaatttggtttttgttattttattataatttaaagtaaaagttaatagattatgattttttaatttttaatttaattaagttaaaaattttaaaattaaagttaattttattttttaaaaattaattttagtttttttgaaaaataggttatttttaggttaatatattttgtaggtatttttaagtttgttattattattattattattattattattattattttgatatagagttttgattttgttgtttaggttggagtgtagtggtataatttcggtttattataatgtttattttttagttttaagtgatttatttgttttagttttttatgtagcggggattataggtatgtgttattacgtttagttaattttttatttttagtagagacggggtttttttatgttggttaggttggttttaaatttttagttttaggtgattcgtttgttttagttttttaaagtgttgggataataggtatgagttatcgtgtttagtttataattattttaaatgtaatattagttacgttattttgttttataatttaaatattgaagttttatgagttttttatttattgtttttattggtttttaattagattgatttttttttatttgtattttatatagtttatgttttgagtagttttttttttgtagaattatttgggtaaattttttgatatatgggttaaatatgtatttttataaagatttttgttttttttttttaatttttggattatcgttaatttaggataattattaattaaaattatgttttgaggttattttggtttaaaacggtaaagttagtttgggtaataaatttgtaggagtgttggttggtggttgtaaatttttaaaaataggttttgttgatttaaaggtaaatttttttagaatatttttgtgttgggggatgaaatagattttttttttttattttgaggaaatatattttttgttttttatattttatggggtatataaaagtgtttttttttatattttttatataaataagttttgagaattattttttttgtattatattatatgaagttgagaaaattaaagttaagatttttttagatttggtaaacgtttttaagataaaagtaatttttttttttttaaattttgtttatatttatattttgattaaaaagattatttttttttttatatttttatatttttgggtgatttttatattttattttttttttagttgtttttggtagaagaggtagttttaaaatttagtttattttattatcggaaatggaatttttattcgttattgattaatttttgttattaatttgatatcgaggtagatgttggaatataagtatatttagattaatgttatttttaaagtgtagtttgtgggttagtattggtttgtggattgtttgttagtagtttataatattatatatatagaaattgtgagtgaattatgtaagtaaatttttattttattttattttagattagtaatagttaagtaaaagatgagtatttatattatgttattgggttttttaaaaatagtatggttattagttgtttatataatagtttgagtaaaatggtatttaaattaggatggttttttaggtttttgtgagtagttatattaaaattggtgaatgtatagataattttttttaggagtatgtgtagatagaataaaatattaaaaatttatataaaatgttagtgtatatatggattttttgatgttttatagatacgggtttttaattttagtaagagataaagatagggaaaaaggtttttaagtaaatattttattattatataatgtttttttacgtatttgtgtgtgaaaattggggtagataaaagttggattttaaaataaattgttaagggaataagttgaattatgttatttattatatatttaattaaatttaggtgtttgtaatgtattagataaagttttagttttagaatatgattttaggaattgaaatttgttattttttttttattttttatttttttatttttagtaattgaattttttttttatgttgaagagttttattagaaggtagggattatttttttttataaaggagaaaaatttattttttttaatattattgtagttaaatattgtaagaggttttggttgtataatttagataattatatgtgggtttttaattaggatgagatgatatagagaggttgggatagtaaatattgtattttggtaaagatggttgaggagtagtagtggagtagtttttaggagtagtagtgatagtagtttttgttatagggtttagtgtcggttattagggtattagaggtatatgtagtagtatttgtgtttaggagtagggatagtggtttttatgagagatttgaattagggtggttgtggattatgtttttggttgtgtagttttaaatttggttttgtgtttaatgtggtttggttgtgtttttatttaaattttaatttgaattgtattttttagaatttttatatgttgtgggagggatttagggggaggtaattgaattatgggggttagttttttttatgttatttttatgataatgaataagttttttgagatttaatgtgtttattaggggttttggtatttgttttttttttatttttttttgttattattatgtaagaagtgtttttcgttttttattatgattttgaggtttttttagttaaatggaattgtaagtttaattaaatttttttttttttttaatgttgggtatgtttttatcggtagtgtgaaaacggattatggattaatatagtgtttttttttaaaataaaatgaatattaatattaatatgtatatttttttatgtttaaattagaaaaatttgtaagttattgtttgttttaaggagtgagtgtgaaattattttggagagtagttttagaaagtagtatttagatatttttttattttgttgagttgtgagttattttttaattttttatttggttatattttatgatagagaaaatgatatttattttttagtattttgttttataattaaagaaatatattttttttaaaaataaataaataaataaataaaaaatttagaataaagtaatatttaaatgtgggtttgagatttttttttattttgggtattttttaattattgattttagtgatattaaatttggttgagtattaggtttgttgtgggtttgttgtagaatatttaggtttttttatagatgtttttgtgttagaatgttgcgtatggagtgtaggaattgtttattaataagttttataggcgaggttgatgtatagtttaggaattttggtttgtgtttttgttattaaaagtgggatttgaagattagtagtattagcgttaatagtaatattatataagtaggaaattttattttcgattttagattagtttagatttaaggtgatgtttaggtgatttttgtttataggaaagtttagaattttttggtttatgtattttttagatgtggggttaggattgtgtagtttgatttaggtgtgttgtttgattagattttttagtaatagaggtttagtgtttagtttttgtttttgtttttttttatagttaattatttttttggagacgttatttagatttaaggttttaaataattgttatatgatattattttttaagtttattttttttaaatgtttttagatttatttgtttaattgttaattcgattattttattggtattttttagcggtattttagattttacgttttttatagtgattgtttgcgacgttttttttttttatatgtttttgttagtttttttatttttagttgatggtaattttttttagttatagtttgatatttttggtattttttattttttttttttatattttagatttagtttattagaaaatgcggtataaagtgattggaaatagtaggaatttaattacgttttattatttttattgtttatattttagttgaagtaatcgatatttttagtttgaaatattgtatttattttttatagtttttttatttgttttgtttatcgtcggtttttggattttgtttttagtagagtagttatagtgatttttttaaaagagaagttgtggtatgtttttattttgtttaaaattattttatttaaaattaaaattttttttatatatttgagttttatgtttatatgatttgattaaatttttgattttattttagtgattttttgttttagttatattcgatttcgtgttttttttagaatatatagatatgattttgttttggtatattgatattgaaggtttttattttttagaaaaaattttttttagatatttttatgataaatttttttatgttttttaaatattttattaaaggttatttttttaataaggtttacgttgataatttcggtataatagttattttttttgttttataatttatattttgattatttgttttatagtatttattattttttaatattttttttatttattttgtatatattagagtgtatgtatcgtttgtttttttttattggaatatatgttttataaggttagagatttttttgattttattttaatgattttttttagatgtaaaaatattttgttatatgtttggtagatagtaaatgtcggttgaatgaattattattgtagagtattttttattttaaaggtagtatttttattaatatagttttaggttaaatgcggttttgtagtaacgatagtataaggtttttttatattgatatttaggtcgtttgtgttttttttagtagtgttgtttgtgtgttttttttttttttttttttgtattttttttttatattaattttttgtatattgtagtatgtaattatattttttttttaggaaagaataatttttgattatgaattttaatttttaaataaatataaatttaagttagattttgttttatagatttatgagtttgtattagagttagtgttaggattattataatttagggaagggagagtgggtaggagagttgagtagaagaggagttttattagaaagttatttaagatgagaatttgtggtattttttttttttgttaattttagaatttagtttttttaaaaaggttggggaaaagatagaaaatataatttaagaaagagttttggaaatagggtaaaagttgtacgggtttgaaaatttattttttaatattatagatttttgtgtgtaggggttgttttttattttgtggggttaatgataggaaaaatgatttttgttgttgttagagatgagggatatttaggggagaaagagattagaacgtagatattagaataggaataggtatagttttttatagaaataaagaaattaaaaataatgatataaaatattagggttagattatagattgatttagtttatgaagtttttgttgtttacggttttagagataggataaggtttaggtaatgtttgtgtgtttgtgattataggttttggtgaaataaggttttattgaagggatataaataatggagtagtgaagatgattaatttaatgaatgattacgttaaattttatgatgaattgagtataggttgtttatatttagttttttatagtttttttttttttgtttttatttataataggtttagtatagtaaaaatggattttggaaggtttttaggttttatttttttttttaagttttaagagttttgttttttttttattgaataattaatttaattttatggtaagaatttgaaaaatttatatttaggtttttattttgaatagtggagtaagtggtagtttagtgaaatttaaaagttaagatatgaatagaaatgttttagttttatttttgttgaaaaaaaatttgatcggggaagagaggataggttagtgtggggtggtggttttggtggtagtggtggattagtagtttatttttttatattatgttaattggaatatagatatatagatatatttacgtgttaagtgtagatatagaagttaggagtttttgaaattataatggtgtgtgttagaggaaggatttgaagaaattttgtattttttagttttatttaaggtagttgttttaagttataggagaaaataattataaataaatttagggtagttattgtatttggtgatattttgaatagtttattatatggttaagatgtttaaatttagagaattttttaatagaattatgttttttttgttttatttttatttattttaggtttttttatgttttatttttataagtattatgagatgtattagagtattgagtataattgttgtttggggtagaataaaaataggaattggttagagtttataggagatgtggttaaaggaggaattttgtttatattgttttaacgattttagggagtagttttttaattttttatattaataggtagttcgagtatagtttttttttgttttatttgtgagaaaaaaataatttgtgagaggttagggaggatatggggtatgaggtttttaaggaaatagtaaattttggattttaggaaaatttttagaattgtgattgtagatttagggtaggattaggaaatatgaggaaagtaggtgtggtgattggattaattgtttttttgaggtttgtttttagtagggatttttttttgtgatttgtgattgttgggaggtttttattattataattattaaggtgataaatttgtttttcgtttttatatgtgttttataaaagagtaagtgttggtatatagggttttaggttaggtcggtttgtgtgtcgacggtgttttttagtgatgaagtaagttataattttatttgtggtttgaaatttatagtggaataagaaaatttagattttattttttattttttttttatttgagtttttttttttttatatcgtagtagtaattatagttttagtgattatagttttaaggagaaataggttagtaacgatgtttacgatggggatggtgggttgagaagacggttttgggaaaggagagggaggtgaggggttttgatttttaggttttagttttgttttgttgaaggttttttgttttttttgagaggagataatttatatttttttttattttattttagggtgaggggttttggtagttttttatgttgtatatggtatatgtatttttgttttttttcggaaggtattattatagttatttatttttggaaggtttcgttttttgtaggtttggtttttataagtttcgtgttttgggtttggttttttttattttgttgttaggttagtgtgattttcgtagggtagaggtttagggtttagtattttagggtggttttatggttagagatggggtgttgggttatatgtgtttttgggggatttgaggggaagagttagaaaatttaggtattttgtattttttataggatattttagtagtatatatgtgattattttgagaatggataggatatttgggatggggaagggagtatagaatttagatattagtttggatataggaatttgggataattttttattttttggaaagttcgagtttttgatgggggagtagggatttttggttttgatttgagtggaggttaaggtatttagaagagttggaatcggagttacggatatattgagtgtgagggagagaataaggtttgagaggaaaatttttggtgttttaggttgttgtaggggttaaaggggattacggattagtattttagggattgtttttttttttatttttttagggattttattttttaattgttttagagagtagggtgggtttttagagttattttttggtataggatttggaaatttaggattttttttatttaggattagtgggagggcgatattttagtattggttttatttttttatttttttggtgggaggttagttcgggaaatttataggaaatgagggaggcgttttcgtggtttttggtattcgcgtgttgtagcgtttttttttcgttttttaggtgtttgcggagttattttatgtatttgtttttaggtaggttttgatttgttttgagtatttgttcgttttttatttgtgttgggagatttgagtcgttgtgttcgcggcggtttaggagtgtaggttttcgtttagggcgatgtaatttttgttatcgtaggcgaattgtttatatttgcggaggaggcgtttgtcgggtttacgtcgtagttatgttttttttggatggtgtgagaattatggtttcgttttcgtcgttagtttcgaatatcgagtttcgttttcgtttcgattaattcgcggggattttggtttaaattgaaattaaatcgggtaaaggcgttcgagttttttttttggtcgagggtttgggtaggtttcgtagtttcggggtggattttagatcggagatttagattcgggatttgggttgttcgtgggggatggggagggatcgtgatttgcgtttcgggttagggttatttatcggtttcgttttggttgtaatagcggagtagggttcgtaggtttattcggtaaatttgcgcgtggtttttggcgtttcgtgttttttggttttaatattttagttttttttgttttatttacggcgttcgtcgttttattttcggatttacggagtcgttgtcgaatcgtacgaattttgtgtcgtttacgtagtttacggcgatgaatcggggtttttcgcggtcgggttgggatattgcggtgttgaaatattttaaggagtgggagtttggaggcgaggagaggttgagattcgttcgatttttttttcggcgcggtttttcgggtcgggcgggttattcgttttttttcgtagaggttttttttttttcgatttcgtatttatcggtttaggtttcggttagggttagggtttttaagagtagtaggaggagggttcggggagttatgatttttatttttggcgtttggggagaatttgagtgcgggtggttgcgtcgggattgtagtgtcgggattttagtgtcgggatcgcggcgaagttgattggtttttttaaaaattcggtatttaatgggagtgagaagtgggattatgttataagtatttaggaagaaggttgggagaattaaaatttaggggagtgggtaatttttaattttgtgattttttagtgtagttatcgtttttggggtttgagatttagagagttacgtttggggtttgggattttgttttgatttttttttttttacgttagtttttttgttatattgattgtttgagttttggttaaggatttgtttgtggaaattagggagagaatttttaggttgggtttagtttttttttatttacgtttattttggaattttcgtttttgaattggattttcgattttttatttttttttttggattattttagaagaaaatttattttagggaattttgatgttagagagtgagttcgttttgggaatggcggtgtagagaaaggggttttttttttaaatttggtgaagttgtggttgaaggtataagatagagatttttatagtgattaggtttttttgtttgtttgtttattaatatagtggttagtataatttaatttttgaatgattaggattttaatttgtaaaagatttgattttgtttgttttatatataagtgtatttaaatagtattgtaattcgagttataaagtttttaagtttatttttttagattgtggatttatgattttgggttgttgtatttaaaattatttttattttatagttcgagtttttttgtgtgagtttaggatattttaatataaagaagtaggatttgttattgtatattgtaataaggagttttaaaattgtattgaagttaaaatgtttattattaatgtttaagtattgtttgtttttatgaattatgtatatttaagtagtgtgtatattttatttgtatatttggtatttttttatttttatgtttttaattatgaggaggttattagtttttggtagttttataaaatgtattaaatatcgaatgtatgttaagaattttttgttaggtttttttattgttttagagtttttttttttgttttttttttttattttttgtttttttagtttttttttttgttttttttattttttatatttttttttttttttagtttttgttatttttttatttttgaattgtggtattaatattgttttttattttttgtttatgtttgttttttttatagtgtttagtagttttgttaatgtgatttaggtcgtgttatttttttatttataatggttgggttttggtttattattttgttgtatgtttttaatttgtttcgtatttttttgtttttatttttttttttttatttttttatgtgttaagtaaatattttttagtttatggttttaattttagtggtttttaggtatatttttttatattaattttttattgttgtaagaattgaaattcgattttttgattttttatggtgaagtttaggtaatattaagttgtatttagtaaaataaaggatatttgtaagagtgtagttttatgtaatttattattgtgttatttttgttgtatatattatattaatatattttataaatttaataatatagtaatattttttgttttaagtatttatattgttattaagaaaatgagtgtgtatgtgatttgtgtatgtgtataatttttgttgttaattatttttttttatatatttaggttattatttagtattatttttttttagtttgaagaattttttttaaaattatacgtagtataagatttttaggaaatgaattttttgatttggattatgtaaaagtgtttttatttttgttttttttttttattttttttttttttaattggggcgtttgtgtataataaaatttattagttttagttataatgttttatgaatattggtaattatttatagttatgtaattattatattgtttagatagaggatagttttttttttttaaaaattttttttatgttttttttttatttaatttttgttttttatttttatttttttttttttatttaattattgttgtgttttttgttattgtaataatgaaatttttagaattttatggatatgtaattatatgttatgtagttttttggttttttatttgttataataatatttgagatttttttatgtagttaagagtaataatattttatttatttttgttattgagtagttgttgagtattgttggaattttagtttattcgttggtttttttattttttagttgataaacgtgggttattttcggttagggtttgtaattaatgaaattattataaataattgattataagtttttgtatggttttaaatttttattttttttggataaataaatatttgtggaattgttgggtgatatggtaaatggataggtagttgtttaagaaattgttatattattttataaattgattgtaatttttttttgcgtttttattaataatataagagatttttattttttttatatttatattagtatttagaattattatatgttttttgaattttatttattttaggtgatgtgtgatggttttttattgtggttttaatttgtatttttttgatgattagtattgttgttattttgttatgtttgtttaagagatttattatatattttttgtgaataattttgtaaatttaattattatttttagagatttttttagaattttttattgttttttatatatgtaattaagttgagaaagaaagattttattttttttttttttatttattgtttttttttttttaaaaattatttatatttagtaaagataggggtttaattatgttgtttaagttagttttaaatttttgaattaaagtgatttttttattttggttttttaaagtgttgagattataggtatgaggtattatatttggtttttttattggttttttattttatttttttgttatattgtattagttaggatgttcgtaaggtgttttaaataaaaatgaggagagttatatttttgttttgttgttaattttaggaagtaagtatttggttttttataattgaatatgagggtagttgtaaatttttcgtgggtgtttttaattatattgaagatatttttttcgattttgtttgttgagttattttgttatgaaatggttttgattttgtaagtgttttttttgtattgattataataattgtgtaatatttgttttttgttttattaattgggtgaattgtattgtttaatttttagatgttaaattaattttattttttttttaaaaaaattaatatggtatggtatattatttattttatgtatattttaattggataacgttttgtattgaattgtgagtttgtgtttaagaggaatatttgtttttgatttttttttttgtgatgtttttgtttgggatttttatttgggtaatgttggtgatatggtttggttttatgtttttatttaaatattattttgaattgtatttttataatttttatgtgttgtgggagggatttaggggatttagtgggagataatttgaattatggggttggttttttttatattgttttcgtggtagtgaataagttttatgagatttgatggttttattaggggtttttgtttttgtattttttttatttttttttgttatcgttatgtaagaagtgttttttatttttcgttatgattttgaggtttttttaattatgtggaattttaagtttagttaaattttttttttattttagttttgggtatttttttatgagtagtatgaaaacgtattaatatagtaaattagtattagtagagtgggtgttattgaaaagatattcgaaaatgtggaattgattttggaattgggtattaggtagaggttggaatagtttggagggtttagaataagatagaaaaatgtgggaaagtttggaattttttaaagatttgttgaatgtttttgataaaaatgttgatggtgatatgaataataaggtttaggttgaggtggttttagatggagatgaggaatttgttgggaattggagtaaaggtgatttttgttacgttttagtaaagagattggtggtattttgtttttgttttagagatttgtggtattttgaatttgagagagatgatttagggtatttggtagataaaatttttaagtagtaaagtatttaaaatgtgatttgggtgttgttaaaagtattttattttaaaagggaaatagaggataaaagtttagaaaatttatagtttgacgatgtaatagaaagaaaaattaatttttttgaggagaaatttaagttggttgtagaaatttgcgtaagtaataaagagttaaatgttgattttttaagataatggggaaaatgtttttagggtatgttataggtttttatggtagttttttttattatagatttagaagtataggaggaaaaaatggttttttggtttaggtttagggtttttatgttgtgtgtagtttagggatttggtgttttgggttttaattgtttttacggttgttaaaaggggttaagtttggtatagtttggtttatggttttagagggtgtaagttttaagttttgatagtttttatatggttttgagtttgtaggtgtatagaagttaagaatggaggtttgggaatttttatttagattttagaagatgtatggaaatgttaagatgtttaggtaaaagtttgttgtaggggtagggtttttacggagaatttttgttagggtagtgtggaggggaaatagggggttggagtttttatatagagtttttattagggtattgtttagtggagttgtgagaagagggttacggtgttttaaattttagaatggtagattgattaatagtttgtattgtgtatttggaaaagttagatatttacgtttgattgtgaaagttggttgtatagattaaattgaaagttgttgttttttttaatttttaaaaggtatgtgtaaaattgatgttatttttaaattatttgttagatatattttattaatgaagttttttggatttggagttttttatatgagaaggattttgattatatatttaatttttataattaatatatgattggttatattttttatttttttttaggttagtttttataagtttttttttttaaggaaattgtttattttatttgtttgttaaatttattgatatgagattattaatatttttttttgagatttagagagtgtgtattgatgttcgtttttttttgatattgttaatgtgtatttttttgttttgattagtttagttagaaatttataaagtgtattgattttttttcgtagaattaatatttgggtttattaattttttttgtttttttgttttattttttttatttaattattatttttttttttttttatgttttggtttaatttgtttttttttgttttttatagtagaagttaatttattaatttgagatttatttttttttttaatataggtatttaagggtattggttttttttttagtattattttagttgtattttatatatttgatatgtatgttttattattttttagaatatagaagattttttaatttttttagattttttttttgaataaattgttatttagaattttgatgttaatttttaatatttggtagtatttttattattatttgttttagttaatttgggtagttataaaagaatattatagattatgtggtttgtaaataatagaaatttattttttataattttggaggttggaaagttaaagattaaggtttgggaagagtttatgtatggtaagggttgttttttgatttatggatgttgtttttttttggtgtttttatatggtggaaggggtaaggagttttttggggttttttttataagggtatttattttattaatgagggttttgtttttattgtatgattattttttaatggttttatttttaaatattattatattagagattaggttttaattatgagtttaaggatgataaaagtatttagttttataggattattttattgttatagattttttttttttaagttattttttttaatgtttatatatttttattatattttaagttttagggtatatgtgtataatgtgtaggtttgttatatatgtatatatgtgttatgttggtgtgttgtaaatattaattcgttatttatatgaggtatattttttagtgttattttttcgttttttttttattttataataggtttcggtgtgtgatatttttttttttgtgtttaggtgtttttattgtttaatttttatttgtgagtgagattatgcgttgtttggttttttgtttttgggatagtttgttgagaataatggtttttagttttatttgtgtttttataaaggatatgaatttatttttttttatggttgcgtagtattttatggtgtatatgtgttatatttttttgatttagtttattattgatggatatttgggtcggttttaagtttttgttattgtgaatagcgttataataaatatacgtgtgtatgtgtttttatagtagtatgatttataattttttgggtatatatttagtaatgggatggttgggttatatggtatttttagttttagatttttgaggaatcgttatattgttttttataatgtttgaattagtttatagttttattaatagtgtaagtgtttttatttttttatattttttttagtatttgttgttttttgattttttaatgattatgattttaattggtgtgagatggtattttattgtggttttgatttttttttttttgatggttagtgatgatgagtatgtttttatgtgtttgttggttgtataaatgtttttttttgagaagtgtttgtttatatttttgtttatttgttgatggggttgtttgtttttttttgtaaatttgtttgagttttttgtagattttggatattagttttttgttagatgagtagattgaaaaaatttttttttattttgtaggttgtttgtttattttgatggtagttttttttgttgtgtagaagttttttagtttaattagattttatttgttaattttggtttttgttgttattgtttttggtgttttagttatgaagtttttgtttatgttaatgttttgaatggtattgtttaggtttttttttagggtttttatggttttaggtttaatatttaagtttttaattcgttttgaattaatttttgtataaggtgtaaggaagggatttagttttagttttttatatatggttagttagtttttttagtattatttattaaatagggaattttttttttattttttgtttttgttaggtttgttaaagattagatggttgtagatgtgtggtattatttttgagggtttaattttgttttattggtttatatttttgttttggtattagtataatgttgttttggttattgtagttttgtagtatagtttgaagttaggtagcgtgatgtttttagttttgtttttttggtttaggattgatttggcgatgtaggtttttttttggttttatatgaattttaaagtagttttttttagttttatgaagaaagttattggtagtttgatggggatggtattgaatttataaattagtttgggtagtatggttatttttacgatattgattttttttatttatgagtatggaatgtttttttatttgtttgtatttttttttatttcgttgagtagtggtttgtagttttttttgaagaagttttttatattttttgtaagttggatttttaggtgtttttttttttttgaaataattgtgaatgagtttatttatgatttggttttttgttttttattggtgtatgagaatgtttgtgatttttgtatattgattttgtattttgagattttgtcgaagttgtttagtagtttaaggagattttgggttgagataacggggttttttaggtatataattatgttatttgtaaatagagataatttgattttttttttttttaattgaatattttttattttttttttttgtttgattgttttggttagaatttttaatattatgttgaataggagtggtgagagagggtatttttgttttgtgttcgtttttaaagggaatgtttttagtttttgtttatttagtatgatattggttgcgggtttgttataaatagtttttattattttgagatacgttttattaatatttaatttattgagagtttttagtatgaagggttgttgaattttgttaaaggttttttttatatttattgagataattatgtggtttttgtttttggttttgtttatatgttggattatgtttattgattcgcgtatgttgagttagttttgtattttagggatgaagtttatttgattatggtggataagttttttgatgtgttgttggattcggtttgttagtattttattgaggatttttgtgtcgatgtttattagggatattggtttaaaatttttttttttgttgtgtttttgttaggttttggtattaggatgatattggttttataaaatgagttagggaggattttttttttttttattgattggaatagttttagaaggaatggtattagtttttttttgtatttttggtagaattcggttgtgaatttatttggttttggatttttttggttggtaagttattgattattgttataattttagattttgttattggtttatttagagatttaatttttttttggtttagttttgggatagtgtatgtgtttaggaatttatttattttttttagattttttagtttatttgcgtagaggtgtttgtagtattttttgatattagtttgtatttttgtgggatcggtggtgatattttttttattattttttattgcgtttatttgatttttttttttttttttttttattagttttgttagcggtttattaattttgttgatttttttaaaaaattagtttttggatttattaattttttgaagggtttttttgtgtttttattttttttagttttgttttgattttagttattttttgttttttgttagtttttgaatgtgtttgtttttgtttttttagtttttttaattgtgatgttagggtgttaattttggattttttttgtttttttttgtgggtatttagtgttataaatttttttttatatattgttttgaatgtgttttagagattttggtatgttgtgtttttgtttttgttggttttaaagaatatttttatttttgtttttatttcgttatgtattaagtagttatttaggagtaggttgtttagtttttatgtagttgagtggttttgagtgagatttttaattttgagttttagtttgattgtattgtggtttgagagatagtttgttataatttttgtttttttatatttgttaggagagttttatttttaattatgtggttaattttggaataggtgtggtgtggtgttgaaaaaaatgtatattttgttgatttggggtggagagttttgtagatgtttattaggttcgtttggtgtagagttgagtttaatttttgggtatttttgttgattttttgttttgttgatttgtttaatgttgatagtggggtgttaaagttttttattattaatgtgtgggagtttaagtttttttgtaggttatttaggatttgttttatgaatttgggtgtttttgtattgggtttatatatatttaggatagttagttttttttgttgaattgatttttttattattatgtaatggttttttttgttttttttgatttttgttggtttaaagtttgttttattagagattgggattgtaatttttgtttttttttgttttttattggtttggtagatttttttttatttttttattttgagtttatgtgtgtttttgttcgtgagatgggttttttgaatatagtatattgatgagttttgatttttgatttaatttgttagtttgtgttttttaattggagtatttagtttatttatatttaaagttaatattgttatgtgtgaatttgattttgttattatgatgttagttggttattttgttcgttagttgatgtagtttttttttagtttcgatggtttttatattttggtatgattttgtagcggttggtattggttgtttttttttatatttagtgttttttttaggagtttttttagggtaggtttggtggtgataaaattttttagcgtttgtttgtttttaaaggattttattttttttttatttatgaagtttagtttggttggatatgaaattttgggttgaaaatttttttttttaagaatgttgaatattggtttttatttttttttggtttgtagagtttttgtcgagagattcgttgttagtttgatcggtttttttttgagggtaattcgatttttttttttggttgtttttaatatttttttttttattttaattttggtgaatttgataattatgtgttttggagttgtttttttcgaggagtatttttgtggcgttttttgtatttttttaatttgaatgttggtttgttttgttagattggggaagtttttttggataatattttgtagagtgttttttagtttgtttttatttttttcgttatttttaggtatattaattagacgtagatttggtttttttatatagttttatattttttggaggttttgttcgtttttttttatttttttttttttaaattttttttttcgttttattttatttattttattttttatcgttgatatttttttttttagttgatcgtatcggtttttgaggtttttgtattttttacgtagttttcgagttttggtttttagttttattagtttttttaagtatttttttgtattggttattttagttatgtatttttttaaatttttttcgaagtttttaatttttttgtttttcgtttgaatgtttttttatagttcggagtaatttgatcgtttgaagttttttttttttagttcgttaaagttatttttcgtttaggtttgtttcgttgttggtgaggaattgtatttttttggaggaggagaggcgttttgttttttagattttttagtttttttgttttgttttttttttatttttgtggttttatttatttttggtttttgatgatggtgatgtatagatgggtttttggtgtggatgttttttttgtttgttagttttttttttaatagataggatttttagttgtaggtttgttggagtattcggtcgtgtgaggttttagtttgtttttgttgggtagtgttttttagttaggttgtttgggggttaggggttagggatttatttgaggaggtagtttgttcgtttttagatttttagttgcgtgttgggagaattattgttttttttaaagtttagacggaaatgtagaaattatttattttttgtattgtttacgttgggagttgtagatcggagttgtttttattcggttattttggtttttttttcgttgttataatttttaaaggaattatttggggatatatattagattaaatgaaaattaagataaaatttgttagatataaaatgaaaattattgtattattttatatatatgtagaattttttaaaaagttaaatatatagaaatagagaataaaatagtgattattagaggtagggtgggtggaagaaatggggagatgtattttaagggatataaagtaggaaatatgtaggatgaataggtttggagatttaatgtttaatttgttaattatagttaatattagggtattgtaggttaggtatgacggtttacgtttgttattttagtattttgggaggtcgaggtgggtagattatttaaggttaaggagttcgagattagtttgagtagtatggtgaaattttgtttttataaaaattagttaaatgtggtgttcgtgtttgtagttttagttattcgtaaggtttaggtgagaggattttttgagtttgggaggtggaggttgtagtgagttaagatcgcgttattatattttagtttgggtgatagagtgagattttgttttaaaaaaataaattaaaaaaataataaaaatggtgtattgtatttaggatttttgttaaatgagtaaattataattgtttttgtaatgaggggttgggagtgggaagggaagtaggtaattatgtgaggtgatggaggtgttaatttgttttattgtaataattattttatttatagtattatgttgtatattttaaaatatattttaaaaattaaattaaaaaaagaaaattaagataaagttttatattttttttaaatttaaaattaagataatggtaggtaaaggtgtattaattaaatttaaaatgaaagaattttgatattttgattttattatcggatagaattgaatttgggagagaaaaatattaaataagataataatattttttgttatttaaagattataggcgaagtgttatggtttatgtttataattttagtattttgggagtttaaggtaggagaattatttgaggttaggagtttaagattagattgagtaatagtgagaatttttttaaaataattattttaatattagttaggtgtgatgatatgtatttgtagttttagttatttgggaggttgaggcggagaggtagtttgagtttaagagtttaaggttatagtgaattatgattgtattattgtatttagtttgggtgattgagcgagtttcggttttttaaaattttgtttttgttttttaaaataagattataatttataattaagatataattttttttaaaagttatgtagaaaaagaatattaaaatgtaaaaagtaaaaattatattaatataagaaaaaataggttgggtacggtggtttaggtttgtaattttagtattttgggaggttgaggcgggtagattacgttaggagttcgagattagtttggttaatatggtgaaattttgtttttattaaaaatatagaaattagttgggtgtggtggtgtatatttataattttagttatttgggaggttgaggtaggagaattatttgaattcgggaggtggatgttgtagtgagttaagatcgtgtcgttgtattttagtttggataatagagtaagattttattttagaaaaaaaagaaaaaataggtaaaaatttattgttagtaggaatttgtgattgattttttttagtttatgatatattaagaagttagaaaataagtattagtataaaatatttagataatagaattattaaggttaattttatagagatatataaaattttattttattttaagaaaaagtgtattttttttttaagtgtttgaaattgtttaaaaatttataatatataatttagaaagttttaaaaaaagtttaaaaagtagatatagtaaattttttttattataagatttgaaaattatgaaataaaaagatttattagaaaaaaatttagtatattattgataaatagttttttttttaaataaattttatgttaaatagaaaattaaatttaaaattttaaaatatttagaaaatagtaataaaaatattatatgttagaaattaaggtattttgtaaaagtagggtttaataatttataaaagtaggagggaaaaaagggataggtaaatagaagagataaaatagaattatatagttgagtgtggtagtatgtgtttgtatttttaggtatttgggagtttgaagtgagaggatcgtttgagtttaggagtttaggagttcggtttgggtaatataaggagatttttgttttttaaaaaaaaaaaaaagaaaagaaaagaaaagaaaagaaagaggggggcgggcgtggtggtttatgtttgtaattttagtattttgggaggttgaggcgagtagattataaggttaggagttcgagattagtttggttaatatagtgaaattttatttttattaaaaatataaaaaataattagttgggtatggcggcgggtatttgtaattttagttatttgggaggttgaggtaggagaattttttgaatttaggaggcggaggttgtagtgagttaagattgtattattgtattttagttagggtaatagtgcgagattttagtttaaaagaaaaagaaaaaggtagaaatatataaaataagaaatgaaaatatttagatataaaaagaaaaattagtaaatttaagtatattattttgattaattatgtaaattattttgaaaatgtgaatgaaatagtaattttttatggataaatattaaatattttattgtatattgttagaatggatttattaaaaaatagaataaaatttatgttgtttataagagatatttttaaaaaatatagaaagtttgagaattaaaggatagaaaaagaaatgttatgtgaatattaattaatataaagttggaataattttgttaaagcggataaaatattttaaggtaagaagtattatttattttgtgttaattttattttttatattattatttattttttatatgtgtttatttggtatttttagttataatttggtaatttattttattatacgtttttttatttagtgttttgtttataggaaatgtttagtatatgttagtagttttgggtgtttttgtagataagttgtgtattattaaaatgtttgattttattttttgtttaaagtttttttgtattatgtgggtatgattttgaaaattgttaatgttaaatgtttaatatattttttagatttattgttgaggaatgttttgcggaggatagtttagaatttaaatgaaagatatgaggaagaaattattatttttgtgagttatagaagtgtttgttttttatggataattagaatgtaggaaattttattattaggtagaggataatttgataatgaaatgtgttttatagaatatgggagaaattgtggttaggagtggaggttgggaattatgtaggaaggggaagaatgaaaggaaattagttttagaaatgaatatggattttaaattttttttaatatttttttataatttttttttattttattttttttagtttattattatcgtaagttttatgataatatttttttttagaatttttttttttattttatagaatattttttaatatatattaattagaataattttttttttttttaaataatttttttttagtatttgttaaattttagtaagatgatagatagagaaaataataaggagatataagtggttaaaatttaaaagaaaaaaagtaagtagtatttatttgtatattatgttatttgggttttggaaaaaaatagaatatagatattgttataaaaatagtttttaggagttattattattttttattgtgggattattgagaaatgggtatatattaggattgaatagagaattattttgatggattcggatttgttttttttttgttgtagttttttttttttttttttttttttgtttttttttttatttttttatttattttttattttttttttatttgagatggagttttattttgttatttaggttggagtgtagtggtgtgattttggtttattgtaatttttgtttttcgggtttaagcgatttttttgttttagtttttagagtagttgagattataggtatttgttattatgttcggttaatttttgtatttttagtagagatgggattttattatgttggttaggatggtttcgaatttttgatttcgttatttgtttgttttagttttttatagtgttgggattataggtatgagttattatttttaatttgtagttttttttttttttttttgagatggagtttggttttgtcgtttaggttggagtgtagtggtataatttcggtttattgtaaatttcgtttttcgggtttacgttatttttttgatttagttttcggagtagttgggattataggtatttattattatattcggttttatttttgtattttttagtagagacgcggttttattgtgttagttaggatggtttcgattttttgattttatgatttgtttgttttggttttttaaagtgttgggattataggtgtgaattattgtgttcggtttgtagttttaatttataaggataaatgttttttttttatgttttttattcgagttttagattattttttttagaaattttttttgatttatagatagataaaaatttgttaagaattttattgtttatttagttaaggtttaaattttagtttgttttggaaggttttaatttagttggttttattatattttttattttttttttatttaatttgatttttttagaaaggtagttatttttattttatgttttttttttattagtttttttatttttattttttttagtatttatgtttatttgttaatatatatattaagtttattattatatttatttatttaattgtaattagtgtgtttttattttttattaagtggaatgtttagtttttttttgataatttaaattttatttagttgggcgtggtgatgggtgtttgtatttttagttatttaggaggttgaggtaggagaattatttgaatttaggaggtgaaggttgtagtgagttgagatcgcgttattgtattttagtttgggtgatagagggagatgttattttaaataaataaataaatataaaataaaataaatttttacgttttttttaaggttaatattaaaagttttttttttgaaggtttttttgattaaatattagttgtttttagaatttttgtggtatttaatttgattggaagatttaatattagattatttgttgtaattataaatgtatagattttaatattttattatatggtttgtgtatattatagatttttgtttattgtattttggggtttaaaatttattggttggttaatttagttattaaagaatttagtaaatgagaataatattttgttttttttgatttttggtttaaattttttgtaaataggttatatcgtagttatagagtaagaggatttagatatagtttggttggttttttatttttaaaagtttaagtgttggttgtcgagatttttttaatttagtgattagggttttaagttggattatttttttagaatttttgatgatacggttgtttttttttttggtgagtttttgttttagttttattagttgttttaataggtattgtttttttttttttaaaaatcgatggttttatttaaatattgatataatgttttgtttgtggttttgaaatgttgtttttagtaaatgtagaaagagaaaagtgatttttttgagaggttagggaatattagaatatgtgtgagattttttgaggatgagtttagaatagaaatttttttgattattttttttttttttattttttaatattttttttatatatatatttttttttttttttaatttatgtttcgttattatttatatatatatttttgttttatatatatatatatatttatatagaatatttattagagattttttttattattagggtttgaattttatttttttttatagattgagaattttgaatgttatttttgtatttttttagaatttttcgatggtttagaattttgttttatgaaaataaataaggatagtttcgggttgggcgtggtggtttatgtttgtaattttagtattttgggaggtcgaggtaggtggattatttgaggttaggagttaaagattagtttggttaatatggtgaaattttgtttttattaaaaaatataaaaattagttgggtatggtggtgagtatttgtaattttaattatttgggaggttgaggtaggagaattagttgaattttggaggcggaggttgtagtgagtcgggatcgcgttattgtattttagtttgggtaataagagtaaaattttgttttaagaaaagaaaaaaaaagaaaaagaaaaagaaaataaatttggatagttttaagattaagatgaaaatgattttaatgaaaaaagggagatgtaaagtgattttagagtgaaatttaattgtatttgattatgtgtagtttaataatggttgtgtggaataatttttattttagttaataaggaagatttattgagtgatataatggtttagagtaattttttagaagtaagataaaataatatcgtattattattataattaataagatttatggtatagtttttaatttatatttatattatttttttttattaaaaatatagataattaaaattaaaattaataaaataaaaatagaaggtgggtgtagtggtatgtgtttgtagttttagttatttgggaaaataagggtgaagtattttttgagtttaagtttttgagggtatattttggtaatatagtgagattttgttttgtaaaaagaaaaaaaaatagaaataaaaaattaatataaaaagttaaggaaagtatatatgttaattttaaataataataataataattattattattattattgtagagatggggttttgttatagtttaggttggttttttgtttttaagttatttttttgttttggttttttaaagtgttgggattataggtatgagttattatatttggtagtaattttagattattaagaggatgattaaattggtaggtaaagagaaaagggaaataatgaattgtttgatgtttttttttttttttttttttttttttttttttttttgagataaagttttatattgttgtttaggttggagtgtaatggtataattttggtttattgtaagtttcgttttttgggtttaagcgatttttttgttttagttttttaagtagttgggattataggtgtatgttattatgtttggttaatttttgaattttggtagagatgaggttttgttatgttggttaggttggttttgagtttttgatattaagtgatttatttgttttagttttttaaagcgttaggattatagatgtgagttattaagtttggtttgatgtttttttagtaggtaagaagaaatatattaggattttagaggaaataatattttttttgttaaattttgaaagaaaaattatatagattttatataggttgaaatattgtgaaaaaaaaatttttttttttttgaaatggagtttcgttttgtcgtttaggttggagtgtagtggcgcgatttcggtttattgtaagtttcgtttttcgggtttacgttatttttttgttttagtttttcgagtagttgggattataggcgttcgttattacgttcggttaattttttgtatttttagtagagataggattttattgtgtgtgttaggatggtttcgattttttgattttgtgattcgttcgtttcggtttttaaaagtgttgggattataggcgtgagttatcgtattagattttaaaaatatttttataataattgtgtatatattatttgaagttatatattacgagagttattaggagtgttggtattttgtatagttgataagatttgatttgaattttagagatgaaattattaaggtaatgtgatatatttatttttataaaagatataaaattaaattagttttattatttaaatgtaaagggtagtattttattaagaattttttatgttaaagaatttgaattgttttatattttttagaaatgttattatatttttttaaaagataagaagcgttggtgaggatgtggagaaaggggaattttgatacgttgttggtggaaatgtaaattggtatagttattataaaaatagtaagaagttttttaaataattaaaaatagaattattatatgatttagtaattttatttttgggtatttatagtttatatattttttatgttttttgtagtattatttataataattaagatttaaaaaattttaaatgtttattgatggatgaataaagaaaatgtggtatatatatataatgtaatattatttagttttaaaaagaaggaaattttgttattggtaataatatggatggattttgagaatattatgttaagtgaatatgttagatatatattgtgcgattttatttatatgtggaatttaaaatagttaaatttatataaatagagtagaatggtggttgttagggattggtggggacggggaatggagggttgatggttaaagttataaagttttagttatgtaagataaagaagttttagagatttattatatagtataatgtttatagttaaaaatattgtattgtatattttaaatttattaaaagaatagatttttggttaagtgtttttattatatatataaaataataataataaagagggtgtgtggaaagtttggaaagtgatagacgtgtttttgttgtgatgatggttttagaggtgtatatttatttataaatttattaattggtatatattaaatatgtatagtttttatatgttaattatattttaataaagtaatgtaaaaaatttgtattttattttgaaggtattatagaattttttggttaaaagaatagagttggggtttaatacgatttttattcgacgaggttgtgtagttttttttaggagaatagtagtatggtgtttgtgttttcgggattttaacgtattatatatattatttgttggttattttttgaagtattaatggagtttttttaggtgtcgtttatatagtttttttgttttttgtttaggtggttttttttttttgggttgtttttttttatttatttttattttttaaatgttttttattaggttggttatttgttatatatggtagatatttttttttaaaagttggtttgtatagagaataatgtaatggttgtttagtagatttatagatttgaatgatgtagtggtagtaaaagatatgattatagttaatggttattgggttttttaagtagttaagatagatggagaattttattttttagattttttagaggggaggtagtagttgtgattattatgtttaagttttgtaaagagtttatttttaaagtgagaaattattttttaagaagatatgaagaaaataaagaagttgtgagtttaatgaatattaaaatggaatttatgagaaaatagtttttatgtttaaattgtttttaatttttttttttaaaatttaaagttttttttagagtattatttagaatacgttttggtttgtagtgttagatgaatgttaattttaggtagttagttttgttgtaagtattttaaagggtgtttatatatgtaattttttttttttcgagacggagtttcgttttgtcgtttaggttggagtgtagtggtattatttcggtttattgtaagttttatttttcgggtttacgttattttttttttttagttttttaagtaggtgggattataggcgtcggttattttgttcggttaatttgttgtgttttgagtagagacggggttttatcgtgttagttaggatggtttcgattttttgatttcgtgatttgttcgttttggttttttaaagtgttgggattatcggtgtgagttatcgcgttcggttttatatatgtaattaagtgggagtattttagaagattttggataattaattttttaataaagtttaaaggatttgtgtttattttttagtagattagtttagtaaaatatattttttgtaaataatttaaaagtagagaataagaattaataaaatttgggtttgtattttaaaatttatttgaaaatatgagagttatatattagaaattattaggttttggtcgggcgcggtggtttacgtttgtaattttagtattttgggaggttaaggcgggcggattataaagttaggaggtcgagattattttggttaatacggtgaaatttcgtttttattaaaaatataaaaattagtcgggcgtgatggcgggcgtttgtagttttaggtagtcgggaggttgaggtaggagaatggcgtgaattcggggggcggatttgtagtgagtcgagattgtgttattgtattttagtttgggcgatagagttagatttcgttataaaagaagagaaaagaaaagaatgtattaggtttatttataggtttgttatttatatattgtttgagaaatttttttattatggtttaaattaattttttttaaatatgttttgaaatattatagtaaaaaagttatttatgttttagtttaatatatatgtatatgtatatatagatatatatatatatatattttgttgggtattatttttttttattatttgtaatatattttgatttttaaattatagttcgttttaaaaatgttggttataatttgtaaaattggttttatgatagtaggtattatttatattttgaaaaataaattaaattataattttattattaatagtgatttttatttatagatgtaaattttggggagttattaaggtttattgaattattatttgaattttgtattttaaatttatatatttaaatttattattttttttattttttttattttttaggaatacgtattaatagttattttattatttaagttattatagataatagtaaggaggttttttaaaaaattaaaagtagaattattatattatttattaattttattaatggatatatatttaaaggaaatgaaattggtacgttaaagagatatatgtatttttatgtttattgtagcgttatttataatagttaagatatgaaattaattaaagtggttattaaagaatgaatagattttaaaaaatgtggcgtatgtatataatggaatattttttagttataaaaagaatgaaattttgttatttgtaataatatgaatgaattaagaggatattatattaagtaagttaagtaatgaagaataaatggtatatgattttatttatatgtggaattgtaaaagttgattttatagaagggaagaggagaatagcggttattagagatcgagaaggagagggagaagtgaggatgtacgtttaagtgagaatgtatattgaaaattataaaaaattgttgaaattgaagatttaaataaatggaaagatatgtttgtgttgatgggtagaaagatttaaaattgttaagttgttaataatatttaaagtgatttatagatttaattaatttttattaaaattttaatagttttttaaatagatatggaaaagtaggtttttgaatttatatggaaatgtttataaaaaaataatagtgtttgtaggaaaaatagagttttgataggtaatttaaaatttatttatttttatatttataatattaataaagtaataataattcgaataaaaatattagtatagtttttaaagagaaaaaaaaaagatttgttaaattttaaatagatgaaagattttttaaagggggaattaggttgaggggtggtttatgtttgtaattttagtattttgggaggtcgaggtgggtagattattatgtttagagatcgagattattttggttaagatggtgaaatttttatttttattaaaaatataaaaattagttgggtatggtggtgcgcgtcggtagttttagttgttcgggagattgaggtaagagaatcgtttgaatttgggaggtagaggttgtagtgagtcgagattttattattgtattttagtttggtgatagagtaagattttattttaaaaaaaatttaaaaaaggaggttaggtgtagtgttttatgtttgtaattttagtattttgggaggtcgaggtgggtggattacgatattaggagattaagattattttgtttaagatggtaaaatttcgtttttattaaaaatataaaaaattagttaggtatggtggtacgtgtttgtagttttagttatttaggaggttgaggtaggaggatggtttgaattcgggaggcggaggttggagtgagtcgagattgtacgattgtattttagtttgggcgatagagcgagtttttattttaaaaaaaataataattaaaagaatgaaaaaataaaataaaataaataaagggggaattaaagatataaggggataaggaaagatggaagttgttgttttatggagataaggtggagggatattattatgagaagttatagaggataagtagttgaagttttgtataaaatgtagatgataaagatgggtagttttggatggttattttttgtttgtttgttttgtatttgtttaaaaaaaaatatttgatttttttttttttgtattgttatttttttttttttattaagaagttgttgttatggttttaaataggattttgtgttatgaagtgtaatttgtattaatatatttataaatgtatgttaattatatttaaagtagaaaaagaaagtttttgtggaattattttaaagtttaatggattttttttttttatttttaagggatattttagtaataagttgttatggaattgtggtaatattttaatatttttatttttaaaatagtttagaaaaagtgtatgaaaattgggggaattatttagtaagtattttaggatagagaatgtagttaaaatgagtaaaatggagaaggagttaacggtattgtgtatagtattgtatttatagtttgtttttttaaatcgtgtttgggatttggttgttattttggtatagttgttattatttagtgtagaatattaatatatgggggaaattgtatattatataatgtagtttttatattatgttgatattatttttttatttgtttatttattttaagagatatttattgatgtaaaggagattgaatagtgaaggattttatttagaattttgtttataatttgtttagtttatattttattttaaagaggtaattttttttgttaattatttgtgtattttttaatttttttatgataatataataatgattttttattttttttttttttaatatagaggtagtttgttatataacgttttttattttatttttttattttataatatattttggagattttattaaaagtatatagagattttttgtgttgtgattagatttttattgtataatattttattgttcgtgtgtgtgtgagtgtttagttagttttaaattgataggtgtatgaatttttttaattttttgttaaggtaagtagtattgaataaatttgtatataatatttttgtatgtgtataattatatttgtagaatgagttttaaaaaatgaaattgaaaggtttaaggttgtatttataaataattttgaaaggtattgattgtttaattgttttttaaaaggtttgttttaaattggatttttataattaataaattaaagtgtttgtttttttatagttttgttaatagagggtgttgttaaatttttaattttttgttaatttgataggaaagatatgatattttttgtagttttttttttttttttggtaaaagtaaggttaagtgtttttttatgtgtttaataattatttttgtttttttttttgagtttttttatagttttcgagatagaaaaaaggaaaaaggattttagtagatagaattttaataataattgtttgttaaaattttttttatttttttttttagagattgttagtttttttttttttaattttaaggtgtattttaattgttaaagaggttatttttttggatgtgatatgtatgaaaatatttttataagttttttatttgttttttgattttttatgatattttttgttattcggaattgttttttattttatgtagtttagtttattaattttttgttttatggtttttacgatttggagttatagttagatagtttttttttaaagttagaaaggaatatttttttttttttattgaaaattttgatttatttggagtttattatgttatatagttggaattgtgtttaattttaaatattattttttatgtagttatttagttattttaaaagtatttattgaatggttatttattttttttattgatttgagattttatttttattatttattaaattattgtatgtttgggtttatttttagatttttttttattttttattgatttgtttgtttatgtattaatattatatttttttcgttattgaggttttagaatgtttttatatttggtaaagttagttttttttaagttttttttgtttgaggtttagttggtattttttttttattttttatatgaatttttgaattagtttatttagttaaaaagaatatttggttgggtacggtggtttacgtttgtaattttaatattttgggaggttgaggagggaggattatttgaggttatgaattcgagattagtttggttaatatggtgaaattttatttttattaaaatataaaaaatagttggggtggtggtgtgtgtttgtaatcgtagttatttaggaggttgaggtaggagaatcgtttgagttcgggagatagaggttgtagtgagttgagattgtgtcgttgttttttagtttgggtaataagagtgaaattttgttttaaaaaaaaaaaagaatatttttggtatttttattttttataagttaaattaagattagttcggagggatgataattttatgatgattaatgtatgtattcgagaaatattttaggtttttaaagtatttaagtgtttgttatatataggtattatatattttaaagtaagtttattttagagtattttatttttttgttgatattataaatagtatttttttttttgttatattttttatttaaatgttgatttggatatatgaaaattatttatttttttttatagttattttattttgtatgttagggtagaaaataaaattgtaataatggagaaaattgtaaatgagatgatttaaataaaatagtttatttttattttaatagttttgggtaggtttattaagatggtgagtggttgtattttatgaagttatttagggatgtatgttattagaagtttttttatttttaatatgtgattataagattaatttgttttaattaatgatgaagggttttaagaagggttgaagtttaaggtttttttaatttgtgaggtgattgttttatttattataatttatatttttttgttaagattttagttatatggttatatttaattgtaaagagggttaggaaatgtggttcggttaggttttagttatattttatttgtttgagagaaggaaaatggattttgtggttagttagaagttattatatagattagtaatggttattaataatttatatatattttattttttatatttagaaaaaatttattttattttttagggaaatattttatttagttatgatatttagtttaaaatttaggatttttaggtgatatgtagttttttattggatatatatttgagtttttatggtttagtgatttataaagtaataaaatttaaattattattttttattacgtaaatatagataatatataatggtgaagtgagaataggataatggtaaaagaaatttttatttaaaaaatagaaatatataattattggtttatagtaatgattaaattttattgggtaggaattttaaattatttttgtttttttaatggagtaagttttaagtttagtttatttgattattattggttttttttgtgggaggaatttttttgtttgttattttgattattggttttgttttttggaagatttttttttttttattatttattatagttaatataagaagaagtgaggagtatttattttttaggattgtttcgtatagattttgtagtttgatttttgtggttgtaatttgagggtttatgagttattttaagtttaattataggtttttttatgttaggttttatggtttttttgggaatataatttttttaaaaattaaaagggttttttgtttatttgttttatgtattaatgattataattaaagtttttttttaggtttgattttgaaattttttgttttaagttttgttgaatgatttatgttatttttaatttaatggtaataattttgagtgggaagaaaatttttttaatttaattgtttttttaggcgtttgtttttttgtttgttttaatataaggtttttgggaaaagtttagaggaaggtattagttttttattattgatttaataaattattataaatttagttgtttaaatataaatgtataatttataaatataaatttatgataatataatatatattatatatttataatagaaatttatgaatttatagttttgtaagttagaaaattaatattagtttcgttaagttaaaattaaggtattagtaggattatattatttttagaggtttatagggagaatttgtgtttttgttttttttagtttttagaggttgttggtattttttggtttatggttttgtttttttatttttaaaattagtaatataatatatttttttgattttttgttttattattatatgttttttttttattgtagttgggaaagattttttgtttttaatgatttatgtgattaaattgggtttattggaataatttaggatgatttttttattttaaggtttttaattgtatttgtaaagttttttttgttatgtacggtaatatatttatagattttggggattagaatgtggatattttggtggggggatagttattatttggtttaatataagtaattaaagttatattttttgttatttgaaatataaaagtattttttaattttgtaaagatttatatttttggattttattttttttaatttttgtttgtaatttggttattttttgtttgagtttgtatttttttataatattttgttaaatgtaataagaagtaggtaatattggaaataatttaaatttttattaatatttgaatgaatagatatattgtagtatatttatataataaattattatatagtaataaaaaggaatggattatttatatatttaataatatagattaattataaaataattatgttggatgaaagaatttagataaaaatagagtatatattatgagtttatttatgtaaaattttaaaaaaggaagttaatttatagtgatagaaagtagattagtatttgtttggggatggattataggatgggttgaatttaaaggagtagggaaaagttatggggggtgatagatatatttattattttaattgtggtgatgattttataggtggatttttatgttaaaatttattagattatatattttaaatatatgtagtttattagttacgatagtgaagacgtggaattaatttaattgtttattaattgtagattgaataaagaaaatgtagtatatatatattatggaatattatgtagttataaaaaagaatgagatcgtgttttttgtagtaatatggatggaattggagggttattattttaagtaaattaatgtaggaatagaaaattaaatattatatgtttttatttataagtgggagttaaatattgagtatataaggatattaagaagggaataatagatattgaggtttatttgaggatggagggtggaaggagggtgaggattaaaaaattatttattaggtattacgtttattatttgggtgatgaaataatttgtataataaacgtttgtgatatataatttatttatgtaataaatttgtatatgtatttttgaatttaaaataaaagttggagagaaaaaaaaagaaatttggaagtagaaatatatatagagtatgacggttttaaagataattaggtaaaatttgttattttattaataaaagtgtattatttttattttttggtatttgttgttaatgtaaattttgtttaataatttgaatagaattaagtaaagttttgggaatttttgttaggtaggtataaaaatatgtgtgttatttttttgttttatattttgagagagtatgaaaaatataaatatgtgtagtttattgaatattagttggatttaataaagttatttttaaggtgtattaaaaaataaataaagagatatatttatagtattgtatatgggattttattgagatataagtttatgaaggttggggtttttgtttggtttattattgtattattagaatttatgatagtatttggtatatattagaggtttaatatattttatataatttgtagaaggtagaagaatgtttttatttttaagatgtttatgttttaatttttagaatttgattatattatgttatacggtaaaagagaattaaggttgttaattagttgattttgtaaaaagggaggttattaggtcgtatgaggtttaatttaattatattaatttttaataaaagtggaaagaagaagaagtagaatgtagtttagagagataggatatgagatggatataattaattgttgttggatttgaatatagagaaaagaggttatgagttaaggaattttatagttttttgagttgttaatagttttgtttaaagttagtaaaaagataggaatttagttttttaattataaggaattgagttttgtaagtaattagaatgaatagaaaataaatttttttttaaagtttttaaaaagagatgtaattatattaataatttgattttagtttattgagatttgttttagatttttgatttattgaggtaagataagtaaggttaggaggttatattaatttgttttatgtgtgaagttttacggttttttttatagtgaattttttttatttgtatttttttgtattagtattgaagttttttgtaagataagtagttttgtaggattttgttaggtggttataagtttttgatattttatatagtttgggaaagagaacgaaagttttttgtttatgatgtagttatttatttttagttaattagtattaaaagtttaagaagttattagttataaatttttgttttggttggggtgggtggaggtgtgattgggaaattttttagggttttgtatatatagttaggtttaaggtttagtttatggtgattttttttttattgtaatagtaaaaaatatattattacgtggggattttatacgttaatgatatatgggatgcgtgttagattaagtagtttatgtgttaattataggtttgtttttgtttatttgattttattagtattttattaatatgtatgtatagtttttataaaggaaattttttttaaggtattaattattgtttttagttttgagttagttttgagtagtttattttgttttttagagtgtatttttattttgtaataaatttttttgtttagttttattttggatttatttttaaatttttttgtgtggtttagaatttgaatttggtttattaacgatattgtagaagtgtaagagaatatattcgtgttgtttaaatagttaagtttgtggtaatttgttatagtagtaataaaaatttaatttataattaaaagaagttatgttttggtttttagaagtattaaagaagttgtaatgttttcggtttttagtttaggggaatggagtggatgttgaaagtttttgaggggaggaagagtttgaaagatattttttaggaaggaaagggtaaattgggagtgagttagagttttatgattgattatatttttttattatttataaagattgttagaggtattttaattagagcgacgttattttgagtgagagttaggaaaatgaggttgtaatttggcggggtgtatttttagaaatataggtatttttagtttttagatatttatggttaagggaatagattaataatatttattaggttaggaaaggtggtttatatttgtaattttagtattttaggaggttaaggtgggtggattataaggtaaggagttcgagatttgtttggttaatatcgtgaaattcgtttttattaaaaatataaaaattagttgggtgtggtgatatgtgtttgtttcgattattcgggaaatggaggtagaagaatcgtttgaatttaggaggcggaggttgtagtgagttaagattgtgttattgtattttggtttgggtaatagagggagattttgttttaaaaaaaaaaaaaagtttattaaattgatttagatttagtaatgtttagataattttgatatttggagaataaaggtatttttaattttgttttaaagataataatattgatttttgtaaaatatagtaattaaggaaattaattttttattataaatttttgtagtagagtatatttttttatgatttttttttattatatatatatatgatatatatataaagatatatatataagtattgtatttagggtggacgcgtttttttttttattttttggaatgttttattttgtttatggggtagttttttttttattattgaatttgtttttgttgtgtattttagtagatttgttttgaatttttttttgtacgagatttaagaatttttttttggggtttggattgggattttttttttgtaataggattattttttataaatggatttaggtttagtgtttattttgatttattgttttatgttgttttttttaaagtaggtattttgttattggttttatacgtttggggtgaagaattttttttggtttgttcggaatttttttggttttgcgtggaaagttttgtgttttgggaaattttatagttttaggtattttatattatgttttatttgttaaaaattgtgatttaaaaaaattgtgaataatgattttattgtaaaatgttggaaattttgtagaaagtagttgtatggtatgttgggaaaatagggaattttttttgggtatttgattttgtaatatttttttgattataaaagtattaaatatatatttggaggtatttggagagataaaggaaagtttaaagtaatgttttttaagttttgttatgtgtaagaatattttgtttgaaatgtagagttttaggttgtaacgtaagagtgtgtattaggaagagtggagtgttgtttagaaatttggaaggtaagagaaaaggttagttattaatagtagtttaaatgagtcgagagtttggtttatattttgtatgtttaatagatattttaaaattagtatatttaaaattagatttaaatttttttttttggtttgtttttgtttacgtttttattttttattaagttttttttattttagtatttttttagttgtttaagttaaatatttgggtataatttttgtttttattgtttttattatattatatttaattgtgttaattttatttttaaatgtattttgaatttgattattttttataatttttattattatttgtttagtttattttaatggttttttgatagatgttgttatttttatttttgtttttttggttttatttttaatagaggagttagagaaattaaaatatgagttaaagtttatagttagagtttattagttttttgtttttttagtgttatttattttatttaaagtagaattaaagtttttagaatgggttatatggttttatttagtttggattcgtttatttttgttgagttaatgttttgtattttatttgatgattttatgttttgtattttattttttttttattttggtttagatatattggtatttttattgttttttatatttgttaggtatgtttttgttttaaggtttttgtgtagatttttttcgttgtttagaatatattttttttagatatttttaaagttggttttttaattttttttaggtatttgttgaaatattattttttttgtaaggatttttttaatttttttatttaaaattgtaatattttttttttattttttgtttttttttttggtttgtgttaatttatagtatttattattatttaatattataaatttttttttttgagattgaattttgttttgtcgtttaggttggagtgtagtggtaggattttggtttattgtaatttttgttttttaggtttaagcgatttttttgttttagttttttaagtatttgggattataagtgtgtgttattacgtttagttaattttttgtatttttagtagagatagtgttttattatgttagttaggatggttttgattttttgatttcgtgatttattcgtttcggttttttaaagtgttgggattataagtgtgagttattgtattcggagtattataaattttttattattttgttcgtggtttgtttttttttaatagaatataagttttattgggatttttgtttgttttgttattgttttatttttaggatttagaagagtatttagtataaagtagatgtttaatgagtattggtgaaggtatggatggatatataatatatgatagagtttgtagtgtaaaatagtggggaaaattagaggttgtgtattagatgatattgagataattagttaattatatggaaaaaaggggaaataaatatatattttgttttaaatataaaaattaattttagatatataaagatttatatatgaaaggtaaatgttttagttgtttaggtttttatgataaaaatattatagattgggtggtttaaataataattatttattttttatagttttagaggtaggggaagtttgagtttagggtgtatagttagttttagatgaatgtttttttttgggttgtagattgttaattttttattgtgtttttatatggtggaagagataagggagttttttggggtttttgttataagggtataaattttatttagtagtgttttgattttatgatttaattattttttaaaggttttatttttaaatattattatattgaggattaggttttaatatgtgaattttaggagggatataagtatttagtttatagtagttaaattgaaaaatatttagttaataatatagattatttttgtaattttaagataaggtaggatttattaaattagattaagagtttaaaatataaagattgatacgtttagttattttagaatgaaaaaataaatgtttttttttttttaaaagatgatataaagagagagaaataataagttagaaattttaagaagatgtttgtaatatatataattaataaggaattagtgtttagaatatataaaaaataaatattttttataaatttgaaattaatttatttgttttataggattgattatgttttttttttttttaataaatatagaaatttattttataagttttaaaatttgagaaatttatatttgttttatttgagttttttttttaggaaattgacgattagggttttttggtagtattaggaaattgaaatttattttttattgtatttgttaagatattagattttttattttttatgattgtttaattgattttaggttgtttgttgattaattttttttttttttttttttttaatttttgtttttttatatgtagttattttttttttttgttttataaatttttaattttaatttgttgaaaagaggagatagagttaagattgatttttaattttttcggttgtaatatttgaataaagttttttttttttataatatttgttgttttagtgattggtttattgtgtagtgagtaatttagattaaatttttggtattttggtaataaatttaaaagaaaattaaaaatagttaatagaagaaagtataaaaaatataaaagatattatatagaaagagaaatataattggttaaaaaaaaaaaaaaaggaaaaaagaaagaaaagaaaaatgtttagttttattaataattaggaaaatgtatattaaaattaaatgcgataatattttatatatattaaaatggtaaaaagttaaaagtttgataattttaagtgaagttgtagatgtggtttaatgggaattttatttgttattaaagggaatgtagattatataatttttgggaaatagtttttttttataaagtaatattatatatattgtaattatattttaagatttagaaattttattattagttatatattttaaaaagttttgtaggtatgtgttagggtatatgtatgagaatgtttatagtattattggttataatagtaaaattatgaagataaattaagttttaagaatagtaaaatggagaagaaaaaaatatgggatttttaaatttggaatattatatagtagtgaaaatgaataagttaaagttatatgtattaagatggtgaattttaaaaataaagataagttatagaagaatatatatattataattttacgtatataaagtttaaaaataggtaaaattagataatattttgtttagggatatatatatgtattaaggaagtataaagaaaagttaggttttggttttttttttttttttttttttttttttttggatttttttttgttgtagaggttggattgtattgtcgtgattttagtttgttgtaatttttttgttttgggttttcgtgatttttttgttttgatttgtcgagtgtttgggattgtaggtatgcgttgtaatgtttgattggtttttgtatttttggtggagacggagtttcgtcgtgttgatcgggttggtttttagtttttgatttcgagtgatttgttcgttttggtttttcgaggtgttgggattgtagacggagtttcgtttatttagtgtttaatgttgtttaggttggagtgtagtggtatgattttagttcgttataatttttattttttagtcgtttgttttggttttcgaaagtgttaagattatagtttttgtttggttgttattttatttaggaagtggggagtttttttgttcggttatttcgtttgggatgtgaggagcgtttttgttcggtcgttatttcgtttgggaattgaggagcgtttttgtttagtcgttttatttgagaagtgaggagcgtttttgtttggtagttgtttcgtttgggaagtgaggagtatttttgtttggtcgtttatcgtttgggatgtgaggagcgtttttgtttattcgtttcgtttgggaagtgaggagcgtttttgttcggttgtttcgtttgggaggtgtatttaatagtttcgaagagatagcgattatcgagaatgggttatgatgataatggtagttttgtggaaaagaaaagggggaaatgtggggaaaagaaagagagattagattgttattatgtttgtgtagaaagaagtagatataggagattttattttgttttgtattgagaaaaatttttttgttttgggatgttgttaatttataattttattttcggtttcgcgttttttgaaatatgtgttgtgtttatttagggttaaatggattaaggtcggtgtaagatgtgttgttaaatagatgtttgaaggtagtatgttcgttaagagttattattattttttaattttaagtatttagggatataaatattgtggaaggttgtagggatttttgtttaggaaagttagagatttttgtttacgtgtttatttgttgattttttttttattattattttatgattttgttatattttttttttcgagaaatatttaagaatgattaataaatattaaaaaataaaaaataaataaataaataaataaaaagaaaagttaggatggtcggtgtggtggtttgtttttaattttagaattatgggaggttgaggtagtaggattgtttgaggttaggagtttgagataagtttgggcgatatagttagatattatttttataaaaataataataagaagaaaagtttattgggatcgggcgcggtggtttatatttgtaatattagtattttgggaggttgaggtaagtggattatttgaggttaggagtttaagattagtttggttaatatggtgaaatttcgttttaattaaaaatataaaaatattagttgggcgtggtggcgggtatttgtaattttagttattttgggaggttgaggtaggagaattgtttgaatttggaagacggaggttatagtgagtagagattacgttattgtattttagtttgggtgataagagcggaattttgttttaaaaaaaaaaaaaaaagaaaaaaggaaagaaaaagaagtgaaattaaacgaaaagaaaagtttattaggtgtggtggtatgagtttgtagttgaggtgggaagattttttgggttcgggagtttatatgttgtagtgagttataattgtgttattgtattttagtttggatgattgattgaaatttaattttttaaaaataaaaataaaagttgggtgcggtggtttacgtttgtaattttagtattttgggaggttgatggggcggattacgaagttaggagattgagattattttggttaatacggtgaaattttgtttttattaaaaatataaaaaaatttgttgggagtggtggtacgtgtttgtagttttagttatttaggaggttgaggtaggagaatcgtttgaatttaggaggcggaggttgtagtgagtcgagattgcgttattgtattttagtttgggtgatagagcgagattttgttttaaaaaataaaaataaaaataaaagttagggaatgattattataaaaaaatgtagttttagtaaagagagagggagagtgatttattggttaggagtatataataaaagatattggaaatattcgattgtttagagtgatagatgattatataatattttttattattttattaatattttaaaatgtgtatatggattatatgtatatttttgaatatatattttatagtttttgattaaagaaggagagaaaaggaaatagagggtaggtatagataatattttttaattttgttgtaaatgtggagtaggaaaataggagagtatttgaagtaaaaattttttaaaaatttatgttattggttaggcgtagtggtttacgtttgtaattttagtattttgggaggtcgaggtggggcggggaggggggtggtggattatttgaggataggagtttaagattagtttggttaatatggtgaaatttcgtttttattaaaaatataaaattagtcgggagtggtggtggggggcgtttgtaattttagttattggggaggttgaagtaggagaattatttgaaatttagaggcggaggttgtagtgagttgagatcgtgttattgttttttagtttgggtaataagagtaaaattttataaaataaaaataaaaataaaaaaatttatggtattaaggagtttgttttgttttggtttttaaagcgatatattataatatgtttgtatgtttatgagaataatttagtgaaacggtaaaaaaaatttgttgaagtaggagagtagatatttatagatggttagtttatttttgagaaaataagagaggatgggatttagttttgttagggagagtagagatattaaggtggttttgttatggtagaatttgttggaaatttattttttagggtgtaggtaaaagttgtttatattagagatattttagtataaaatttttttaggaggggtgtttaaggaagttgtttattgttgggtgttgttgattgtgattgaagtaattggatattaggtaagttttgggtgttgtaggagtaggtgttgttaaattatgtatttattgtaggaatttggtaaatagtatattagaatttggaagtaaaatcgtttttttttgtaatgattttttagtgttttttattgataaagttttagggttagatggtaaagaaaatataattaaaagatttaggattatttttggagttgagaggtagtaaatttataatttataaattggggaatggagggattaggttgataatatttgaattttttattaaatttattattattaatagtgggatgagattatatatttttaaatgtgatattataggtatatagtattgtttttgaagtattttttttaaaaaattgaatttagtcgggagcggtggtttacgtttgtaattttagtattttgggaggtcgaaacgggcgagttatttgaggttaggagtttgagattagtttggtttaatattgtgaaatttcgtttttattaaaaatataaaaattagtttggtatagcggcgggtatttgtaattttagttatttaggagattgaggtaggagaattatttgaatttaggaggtagaggttgtagtgattcgagatcgtgttattgtattttagtttggatgatagcgagattttattttaaaaataaataaataaaaattttaaatttgataaagttttttaagtaaataaaaataaaagttaaggaatgattattatagaaatgtagagtgatgtttatttttatagtagagagagacggattagtagtatttgggttagggatatatggtgaaagatattgaaaatgtttgattgtttagaatgagagatgattatatagtattttttattattttatgaattttatttaagatatataggaaatagaggaataagttaattgatattatgaggaagtaattaattaaatttagtattgggaatattttatgggataaatgaattggtttttttagtaaattaatggaatgaaaataagggaagggtagattgttataataagattaagagatataataataaaatgtaatgtattgttaaaatataatttttaaaagttaatgatagtattttatataaagtgagtatgtattaaagatgtattaataagagattagtaaaaaaagaattagtttaaagagaatttggaagattgaatatatatatattggatatatattttttatatttttattgaataaaatttattgatattgttattgattaagaattatttttattgatattatttttttataagttaatgtttatttttaaggagtattttaaatattttaaaatattaaattaaagttaaattattttagagaattagataatttttacgtaggtttattagaaaatgttatagtgtcggtcgggcgcgttgtattaagtttgtaattttagtattttgggaggttaaggtaggaggattgtttgggtttagaagtttgagattagtttgggtaatatggttagattttgtttgtataaaaaatataaaaattagtcgggtatggtggtatatatttgttttagttatttaggaggttgaggtgggagaattgtattagtttaggaggtcgaggttgtagtgagttatgattgtattattgtattttagtttgggtgatagagtgagattttgttttaaaaaaaaaaaaaaaatttttttttaagttgaatttgttattatatattatataatatatttttattaatttttgagttaatagatatttaaaagttattaaatttggaatataaagtattttaaatgatattttaagttatataagagattggtttagtttacgttttttgtttaaaatttagtagttaatgttattagtatttaaaatgtttttttttttttttaaaaaggatagttaaatttgttattttttattttgtagttagtttttagtataaaagtaggtagattttagtagtataaaagttatttattagtttatgtttttattagaaaatagaaatgttggtttaaaattgttttattgatgtaatttttatttttttttttatagatatttatttatttattttggttttaatattaaggtattttttatataaaagatttaaatagattttttgtatttttattaatgggagttttatgtttttaagtttttgtttgtttgtttgtttgttttttgtttggaggtttttttttaagtattttagtatttttaaaattttgagattttgaatggtatgatttagtttaatatgtttatattaaatttaggggaaaaaaattaatatattttttttatttattataaggtttatgttgagattttaataataaaaaatagattaataagagaaaagtatgtatatttattttatttaagttttatatgatatgggaatttttagaaacgaaaatttaaagaaatggggatatttgtgtagttgtatagatagttaggtagatgtatgattgtaaggataaaagtgtatgagttaacggtgataaattgagaagttggaaaggtttgtttatttagtttttttttggtatatttgtgtggtagttttttttttagggtataggagaggatgtttgttatataaggggttttagatgaaggagggagaaggagggagtaggttagagagtgatttttttagattttgtggtttgttttagggaagaaggggcgaggggaattttagtttttatggtttgttttagggtagaaaggagtaagaggttagagaaatttttttgtttttgttatttttttaatttttaaggtgttatattttggggtggtattttttgtattttgttatatataaatttatttttagatagcggtttttagttttttttgaggttaaattagagttgtttaaggaatatatttattaaatttttttgttttatttaagatatttattttaaatgtaaataattatattatattttttggtttagttagtattgatttattattttaaagttttatatttaagttttataataatcgtacgaagtagatttagttatttttatgttatagaagaagaatttgtggtatatagaggttgagtagttgttttaaagttttatagaatgtggtagattggagaatttaacgtagaatttttatttagttttatatgttgttttggtttttatttggtatgattatagaaatggagagttggaggaaggaattttaattttgttttagaattttaaatgaagtaggaagttgtagaggggtataaagttataaagttgttttaaagttgttttttttaatataaagtagaaattgtgtttttagtatttatttttgttatttttatttggatttgagaagttgtattaattaagatgtagtgtggtgggagagggatttagtgtatgattgatatttagttaagtagggttaggtagttttagaaatgtttatattggggaattgaataatgagaatatatggatataagaaggggaatattatatattaggggttgttgtggggtggggggaggggggagggatagttttaggagagatatatttaatgttaaatgataataaatttgtacgttgtgaatatgtattttaaaatttaaagtgtaataataataaaatttttttataaaaagaaaaagaaatgtttatattgagtttattttatttaataaatatttatttatatggaagttatgtgtatggaagataggtgttgttttaatttttttggggcgtatattgagggggaggaagatcgaaaataaatatattgataaagaaatgaataaggtgtttttaaatggtaataaatgtatgaagaaagggaaatagaataatgtatgatggggaattggttttaattgggtgagggaggaagatttttttgagatgtagatatgattgataagaagcgggtagttatgtaaggggttggggtagggagttttaagattaggtgtaaggtgaaagtatagggatcgagggagaagtggtatgagggaggttagagagttaagtagagttgttatgttaggagttttagtttttgtaagagttttttatgtttttttaagtgtgttgagaggatagagaattttaagtggggtggtggatttgtggttggagtttgtttagaatggtttgtgaataggttaaagattttaggatagggagaaaacgtttagtggtatagtattattttttattttattattattttttgagacggagtttcgtttcgtttttaggttggagtgtagtggggcgatttcggtttattgtaattttcgtttttcgggtttaagcgatttttttgttttagttttttgagtagttgggattataggtgcgcgttattacgttcggttaatttttgtatttttagtagagacggggttttattatgttggttaggatggtttcgattttttgatttcgtgattcgtttatttcggttttttaaagtgttgagattataggcgtgagttatcgcgttcggcggtagagtattatttaaggagtatgttaaatatattttttttttatattattaattaaaaaagtaggtattaagagggtttaggtaggtgttgagattatttttagagtataggttcgttagagttgtgtttagtaggtgaggtttatattttttttagttcggaggggtagcgtgagttatattgttggataaaggggaaaaagataaaatgttgggttggggtagaagggaaggacgcgggtgttaaatgtgggcgtggttttttttgaatgttttatttattttattatatattgtttaaatgtagtgtaaatttttttatttttagcggaggaggggtgaagatttagtaggttttagggtttaggattttgagtttttttatttatgaatattaaataattgtagtttatttttttattattgtttaggcggacgattagtgtttttagttagatttttatttttaggagtagggtattggttgattcggagaatttgcgtcgtttttttttagtttgttgttagtttagtgtacgagttgaatgtcgttgtcgtttggttggtcgggaaagacggggattttgacgcggcggcgtttgggatacggtaatcgtagtatagggtatggttttgcggttggatcggacgcggcggttgtaggtagagtaggaagagagcgtaggttgggtagcggcgtacgtttcggcgacgttagttttcggggtcgtggacgggggcgcgttcgagttttttggaaatttttttattaaggatttggggaatttaagttttggttcgttttgtagtttttggtttttaaatttagcgtcgaggagcgaaaataatttttttgaattgggtttagatttttaagtttttggaattttagttttttttttcgtcgaatggcgataatggttgtttggttgaacgttattttatttaggaagtaataattttcgtaaataggtttttgagagtatttgtttgttaaaattttgttttgttttggaagtaaatttaggttacgttaggggcggggatttcgtatttaatgttgagtatttggcgagcgttattttcgttttaaagcgttttcggattttggatttagtataaggttagagttgggtagtgaggggtttcgagaggtggaaaggggattattgtttttttaagagttttacgtaggtgatttttaagttttagtatttatttttttagatcgtgtaataggttattttaattacgcgttaaatttaggttgcggtttttggcgtagtttcggtttcgtttgattttagtttttatttcgttgtttttggtgttttatcgttcgcggttgtttggggatttgttcggtgattagtgacgtaaaagagattaaggtttttattggacggcgaagttcggtaggagttaatttcggggttggttcgggagaaatttcggcgaagggtttcgaatagtcgggagattacggggcggggacgagttgtcgcgttggttgttcgtgtaggagcgggattcggaatagatcgtcgtgagagaggaggggcgtcggtcgggattcgcggttcggagttcgggatcggtgagtagggggtgtatatgagatatatagcgaagtaatagtttcgtacgtttatcgggtttggggcgatttaacgtagtcgtcgggttcgggtttaaaacggggttaggttttcgggcgggtttaggagggggttaagttcgttgcgttttttttgttagttagattttttttgtttgtttgtttttatattttttttttttttttgggtttttttcgttttttggtattttatttagatttttatttattttagtttgcggaattagaagtaagcggggtttggatgatcgttcggttgtttggagtttggtagataggcgattaatttagttttttgattaaagtgttatgttttttttttttttttttttttttttttttttgttcggagtaaatcggtttagttataaatatttggagttgtgtttttattttttttagtttattagtattttttttattgattttttttttatttggttttagaaaaaaagtgtaaatttaattttgtggagtaaatgggagggatatatttttaaatttttagtagattttaaattttgatttacgatttgtgtgtattttaaaagaggggagaatgatattcgtttatgtatgttttaattttttgtttttaatttttagttgaaattataatttttaatatgtttttttttaagtttaaaaaaattatttttaaaaaaaataggttttttatgttttaaaaattgtaattttattgtttaagtagattttattttttataatatttttagatttatagaagaattgagaagatagtataaattttttatatgttttaaatcgggttttttgttattaatattttattttagtgtggtatatttgttgtagttaattaatattaatatattattattgattaaagtttatagtgtgtttagatttttttagtttttattttagtattttttttgttttatgattttatggaggttattatattatatttagttgttatgtttttttatgttttttttggttgtgggagttttttagatttgttttgatgattttgatagtattgaagaatattggtcgtgtatgttgtaggatgtttttttattggaatttgatgttttttttttaagattgggtttatgggtaattgggaggaagattatagaggtagattgttattattattttatcgtattaagggtatgtattaatatgatttatgatttaatattgatttgggtgagatagtgttttttaggtttttttattgtatagttagttttttttttattttttgcgtgtattgttttttttagaaggaagttattaagtgtagtttatatttagggagttaagagttatattttttttttttgagggtaagtatttatatattattgtttgtagttattttgtatggaagatttgttttttttttttttttaatttattaatttatttaattattaattttagtgtagatttagggatatttattttatattttggtttataatttaatattatttaattttgttgtttaaattattgtggttttggttgttgggagttttttttatattggtttttgtgtttttttatagtatttttatagagttttttgttaatgagatattcgtatttatgtgattttgttttaattttaaatagtttggtaaatttggtaaaatattttttttttgttaagaggtaaggagattgaaggtttaaggtagtgggtgattttttagatattattttttgtaggggagtaataggttggatttagattgtgtgtgattattatagaagatattgtaaattttcgaagagagtttatggtttgtattgaggttttttggaatgattttagatttggatttttttaggattagaatagaaaagatacggagaatgggaagttggtttgagaagataaaaatataaattggttggtattaggatgaattagattttgttagttttatagaaatggaattttgtttttttttttaaaattgtgtgtgtgtggagggaggttaagagagatttaggtaatgtgtgtgggtaagaatgtttaatttaaagagagttttggaagtttgttgttgaagtagaattttaatgtgggaaaggggggtgtgtagtgaaagggggaagaatggagatggtagggttttggaattagaggaggttatttattttataaatatttgtagattttttattttgtgttagatattggagataaaaaggttagtgaggtatgatttttgggtttatattttggtgggagagaagatagataaaaatattaattatagttatttatttatagtttagtttttcgtggttttcgttatttatggttaattttagtttaaagatagtaaatagaaaattttagaagtaaataatttataagttttagatgtgtattgttttgagtagtatgatgaaattttttgtttttttattgtttttttattataagaagggtaagtatagtataagatagtttgagagagagagagattatatgtatataatttttattacggtatattgttatagttattttgttgtgttattattgttaatttatttttgtgtttattttataaattttattataagtgtgtatgtgtaggagaaataggttttagatatttattgggggttttggaatgtattttttgaggattgaggggatttttgtatgaatgtatttttagcggatggggggtgttattgtatgaagtattgtgatagtgttattgtagaaatatagtatatgtaaagttgtaggaggagggatatatttaatttagaggtgggatgggtataggaaatattttatagataaggggataaattgtatttaagtttttaaggatgcgttggattggagagaagagtatgtataagggaatgggtggagagtggggagtgaagaaggggttgtttttttggtttagtgtatttaatggttagagaattaggtaggacgaggagggatttggggttggatgggtaagttggggttagtcggatgtagggtaggggaggatgtttgtgtagtttttttttttgttttgagttagagtttcgttttgttatttaggttggagtgtagtggtgtgattttagtttattgtaacgttcgttttttgggtttaagcgatttttttgttttagtttttcgagtagttaggattgtaggcgcgtgttattatgttcggttaatttttgtatttttagtagaggttgggttttattatgttggttaggatggtttcgattttttgattttatgatttgtttatttcggttttttaaagtgttgggattataggcgtgaggtatcgtgttcggttatttgtgtagttttgattttagttagtaggagtttttttggtgtgtttgtttttatttttatttttatttttatttatttattttattttagagatagtttttttttatgttggttaggttagttttgaatttttggatttaagggatttttttgttttagttttttatagtgttaggattataggtatgaggtattaaatttagttttagttaggagatttgaagtaggagaataataaggatgagattttgtgtgttagaaggatgattttggtagtattttttaggaaatatgttatattttattaaatttaagatgttatttgttttaatttattttttgttgttgtaatagaatattatagattgggtaaattgtaaataatagatgtttatttagtttacggttttggttaatggatttttgtaagaaaggtattaatttatttatgagagttatatttttatgatttagttacgttttaaagattttattttttaatatcgttatattggtaattacgtttttaatacgtgaatttttgggggatatgtttaaattatagtattattaaattttttatgtgtttttattttatgttttatattaaaaaaatattttgttagttaaattatgatatgtaattgattatattttagagatgttaaaatgtgatgttataggtgttttaaatttgatgaaaagtattaatttttttgttgatggtttagatttttttttttttttggattaatggttaggatgtttttattttattaatttatagatggtaagttattaagggaaagaagaatagaagttgggtgggtttttttttttttttttttaaagataaatatttataatatttattggttgggtcgaggagtataatatttggtttgttgttataggattttttggtttgttattgggtttgttttatgttgtttttttttggggagttaaatatatatatatatatatatatatatatatatatatatatatatatatatagatattttatattttattttttagagtggtaaaaattaaagttgatattattaggtgttggtgaggttgtggggtattatgagtgtttatagtttgttgagtagattatatagtattatagttattttggaaatagtttggtttgtttagttaaattgagggtatattttgtttgtgtgtgttagaatatgtatgtagaaatatttattgaagtagtgtttgtaattgttttaaattggaaataatttatatggttattagtagattgtattaaaaattgtatagttagagagtagtaattaagtaaaattagtttataattatatggatgagttttataaatatgttgatagttttttatttaaatatatgtaaaaaaaaaaaaaaaaaggaaaaaaattttatttatttgaggtttaaaatttgagaaaataaattttgtttatggggtgtatatttaggtttaaaattaaagaaaagggaaggagtgatttttattattataatttattttataataattatttttttagatatagttttttttttttttggtttttgtaagttgttggagcgaaattttggatacgatgatttgttggtgacgtgtagtttattgtttttgttgttatagggaatatgaagaaattgtttttttttttattaatttattattattttgttggagagaaagggtaggtggttaagattgttcgtatttttttagtagatgtgtaggaagtattttttttgtgttagatattttgtgtttgtgttttgtttttttagttagtttttattgtttattttgtgttaagtaatatgtagattttggggataagatagatataatttttttttttgttttatggaaaaagttggtgttaagcgagtaattatattaataagttaggatttaaaattgtagagaagtatagggtgtagtatggggtgttttggggttgtataattagattatatgtggatttaatttgataggttaggaaagaattgttagaggaggtggtttttagttgagattttaagttagaaaaggtatttgttaagtgggaaagggatggtgttttaggtagaaggaattatattgtcgaagggtttagttaggaaagagtatagtattttgaggtatggagagcggtttggtttggttgtgagtttgaggtggggagtggtaggaaatgagtttggagatataggttgggttatgattatttgggaatttagttaggattttttgggatagtttttttatagaagaaaggaaggataggagttttgattttatttttggagtattagaaagttattgaggggtttaatttggttggttattcgggtagattggtagtttaatacgtgatcgagtgtgtttgaggattaaaaggttagagtggttgtagtattggggtagtaaaggggagaggaggtttatgtaaattaggaaatttttgagggtttgatgattttatagttggatttgattttagtttttaaaggattttttaggttattggatgtaagttttggtaggatagggagtttgttatttttgttttttgttgtaatttcggtgtttgatatatagtcggtatttaataaatatttgttagttgttgaataatttttaatattttgttgtttaaatttttaatggttttttagggttgttaggataaagtttaaaatttttaatttgggttatagttttgtataatttgtttttttttgtttttttattttttttttgttcgttttattgtattttatttgtggttaattgttagttttttaaatttatcgttatttttttttcggcggatgattttttttgtttgtgaggttaattttttatagtattttatatgggtagggaagagtttattttttaggtattaaagtgtagtgtatggtggaatggaaggagtttagagttgggaggtgtattttattttatttcgtgttagtgttggttttgttgttagttagttttgttgttgggtaaatgagttcgaggttttggtatttattttttttttttgtaaataaggggttttagtgatttatagttttggatagattttagaattttttgggaagtttgttttttaatattagagtttgggttatttttggagattttaagttagttggtttaggtatgttttgaagatttattagtttgaagattataaatttgatgtgtagttaaggtttgaattattttataagatgaaaaaggatttttttttatatttggtgtaaagtattaagtgatatttaggaatattttagataagagagtttggtttatgatttaatattagatagatattttggtataaatatgaagaatttttaatttttttttgtgggttagttataagattagggtaatttaacgttttgttttatttattttttagttggttgttattttttgtttttttttgagttttgtggggatttttagcgtttagagttttggtagtttttgtggtttgtattgtgttttagagtattattgatgtttagtttcgtggggaaagtaagttaagtgtgattataagaacgtattatttatagttattgggattttttgggatagtttgggatttaggtttttggtttggttagtaggggtgtagttatttttagtatgtatatttagattatttgttttttgtttcgaattttggtttttttaggtttgttagaggtgttttacggaagtttattttatggagagtttgtttattttagattaaaatatggggattaatttgggatttaggagtttttaaatggagtatttatagggaatggagttttaggttaagtgttttgggattataggtgttttgtttttgtttggaggtttagatatatgtttgagaagtagtttgggatatttaagagaggtttgaattggtattttggaggttaggatgaaaatttaggtttttttatttatttttttgggttttagagtttatatttgggatttattgtttattagggtatttttttgggtggtatttaggagtcggaggtaggttagagttttatttaggttggagtgtagtggcgtagttatggttgtttgtagttttaatttttcgggtttgggagatttttttgttttaattttttaagtagttggaattataggtatgtgttatcgtatttagttaatttagttaatttttttttttggagataatgttttattatattatttaggttggttttaaatttttgggtttaggtagtttttttgttttagttttttatagtgttggaattataggtataagttttcgtgttcggtttttagttagtttttgtagtttatagtgattatttttggagttaataatcgtgtatgtatttatattttgaaattatatggtgttattttgattagtttgttgatatatgtagattaggtatttatgagatttagagatttataggggaggggtggattttagggaaaagggaattttttagagaaaggtagggagtgtttgtagttttgtttgtgaggagggtattaggatattgtagggtttgtttgttgtatttttttggttttatagaattgtagttagtttttggtttatttttttatttttattttttgagatggagttttgtttttgttgtttaggttggagtgtaattggcgtgattttagtttattgtaattttcgttttttgggtttaagcgatttttttgttttagtttgtttagtagttgggattataggtatgcgttattatatttggttaattttgtattgttagtagagatggggtttttttttgttggttaggttggttttaaattttcgattttaggtgatttattcgtttttgttttttagagtgttaggattataggtagaagttatcgcgttcggtcgtttttggtttattgaagagatagaaaaatatttttttatttttagtagggatgtgtgatttttggtgtaagggagtttatgaagtgatttttttaggtttagaatttttatttgagtaaagggagtgggggtggagtgggttatttttgaggtttttttttttggttttgattttggtttttgtttgtttaggagttaggaatggagagaagggtaatggtgttattttttattgtggaaatttgttgagattatagagaatatattgacggtataaaagggtagaattatagtagggtgcggtaagttggggaagagtttttggagagggtgaattttgtattggatttgatagaattgtgtatggggaaggggagcggttattttggtttgtttatattttttatatttaattttattttttttaattttgaaattttgagattttttattattaagaaggaaaattattgtttaatagggatattttattgtttattttatatgtgaaagtttgttatagttaaggttagggtgtttttggttagtattagtagaatatatgtttttttttttttgttagtattatttcgtttataaagtttttttatgtagatgattttatttgagttttttaataaaggagttggtattagattttattttatagtgtgtttgggtagggaagagagtgtagtggattgagtagaggttttggtattagatattgttttttagttatgtgtttttgggtaagttgtttaattttgttgagttttagtttttttagaaggagtttgtataagtaagggaagggattggttatagaagtggtattgtgttttatttatttagttatggtagatttttaaaaataaatggttttatataattaatattgtttgtagtttttttgaatttatttatttgtttagtaaatgtgtattgagtttttataaggtgttaagtattatgatttttgtattagtgatttaattatttttgatggttattatagatttttttaagaatgtgatagaaaattgtagttttttttttagaaaatttttttagttttttattttgttttgtagtgagttaagatagttttattgtattcgggggatagagtaagattttgttttaaaaaaaaaaaaaagaaaggaattattttaaattaggtgggagatatggagttttaaatattatagtatttattgtttagaaatataggtatttttagtcgggcgcggtggtttatatttgtaattttagtattttgggaagttaaggtaggtggattatttgaggttaggaatttgagattagtttggttaatttggtgaaatttcgtttttattaaaaatataaaaaattagtcggatgtggtggtgggtatttgtaattttagttattagggaggttgaggtaggagaatcgtttgaatttgataagcgaaggttgtagtgagttagattgcgttattgtattttagtttgggtaataagagaaaaattttattttaaaaataaataaatatattaataaataaataagaagtataggtatttttatatataattttagtaaatattattaagaaaataattttagatatggtgtagttgtttatgtttataattttagtattttgggaggttgaggtgggaggatggtttgagtttaggagtttgagattagtttgggtaatatagtggtaatttttttttataaaaatttttaaaaattagttaagtgtggtagtatgtatttgttgttgtagtaattcgggagtttgagatgagaagattgtttgagttagggaggtagaggttgtagtgagtttagatagttttattgtattttgggggatagagtaagattttgttttaaaaaaaaaaaaaagaaagaaagagaggaaataattttttaatatgatttaatatttagtttatttataaattttttataatagttttaagattatttttataattttttttttttttttataggatttaattaaggtttacgtattgtatttggttattatttttttttagtttgtaaaaattaaaagtagttttttcgaaggttttttttttatgatattgattttttaaaagattaggttagttgttatgtgtaatgtttagtattttggatttatttggttttttttttatggtgtggtttaatttttttattagtatttttttagttgtaatatattttagagtattttttttttttatattttttataaattggaagttagatttaaagttttgattagatttatttaagttaaatatttttggtataaatattttataggtaatgttgtgtgatttatatagtgttatgttagaaagtatatgttattttgtttcgtttgttgatgacgttggatttggttatttagttaagataattattggattttttttttacgaaggtatgttaggaagtaatttatttattggtgttttggtattatgggtattattttattttttaaaattttttatttaatagttttagtatttattgatgatttttgtgttattataatggtagtcgtaaaatgattttttaattttgttattttttttttatttatttgttgattaattttatagaaggttatttttttgtaatttttagataattttaggtatttagtatatatgtaataatttttagatagttttaggaggtttagagattattaaattttagtatggagtttgggtgatgaggtgttttgttttgtatggaagaagagttgtagttgagtttttatagtttttttattgtttttattttgtaagtaaattgtaaaataagtttttaatttaaagataatataggttattttttaataaagaaaaattttagtttttaaatttttaggttatttggtaaagaggtatgataaagggtttgaaagtttatagatacgtttagtattattttttttttttttttttaaatatttgtagtatgttataattgaaaaattgttgagttaggtttatttttttaatagtaaagttaaggagttggattaggtaatttttagtatttttttttttttttttttttgagatggagttttattttgttatttaggttggagtgtaatggtacgatttcggtttattgtaatttttgtttttcgggttgaggtgattgatttttttgttttagttttttgagtagttgggattataggtgtatgttattatatttgggtaatttttgtatttttagtagagatggggttttatcgtgttagttaggatggttttaattttttgatattgtgatttatttgtttcggttttttaaagtgttgggattataggtgtgagttatcgtgttcggttaatttttagtatttttattagtattattaatatgtaggaatttgatattatttttatttgatagttaaattttttgaattttttatttgagttttgaaggtgtttgattttttttttattatgttttttaaagttatatatatttagatttattagtgtttttagttggaatttattattagtattataagaattttttatatttatgtagtttttttacgttataaaatattttttatgtattattgtattagatttttaatgagtggacgttatatttttgttttgtttatttttgggttttatagattgggggttttatttttgttttattaatgttattattgatagaggttattgaattttgttgtgatggatttttattatatataattattaatagtattgatttgtttgtaatttaggttgttttattttagtttcgtagttatttttgtgttttgttggttgtttttttagcgttgttgtagttgttttttatggatttataggagagtaagttttttaggtattgttttgtgacgatgttgttgaattttgtagtacgtgtgttattgtggttggttttgtttatttttttttttgttgttatttttgaatttaattttttgtttgtggtttggatatttattggatttggaaattaggggttgtgggtttttttttagattttcgtttgtgtattaggtttgtgtttagtattttttttataatttttttatatgatttgtttagaaatttttaaaggtaagtattattttttttattttatagatggatatattgaggtttagtatttaagtgatttttgtattgttatatagagttaggggtaggaggttgtttttgggttagatgtgttgaggtttataattttagtttggaattgggttaggattataaaggtaaatagaagtagagttttttttgtgtgttttcgttttttgtataagttaaggttttatagtatatagtagttatagttatttgaggatttttgatatttagacgaggtagttatagttaagaataagtttattgaggttaagttgtgtttttttggagggttgtgtttagagtttagttttttaggggaagtaaattaaatttaaattatagaatagtttagggaaatatttataaagggaaatgttgatagttagatttttgaagttttttgatgtttttcgagttttggtaaagaattttagtgttgtttgtttgtttgttttttaatgttttttggttttttgtttgttttgagatagttttttattttgttgtttagtttggagtgtagtagtataattatggtttattgtagtttttattttttagatttaagtaatttttttgttatagtttttttagtagttgagattatagatgtatgttattatattggggtattttaaaaaatttttaaatttttttagttgagatagggttttattatgttgttgaggttggttttaaatttttcgatttaagtgatttttttgttttagttatttaaagtgttggatttatagggtgagttatgttatattgtttttttttagtttttgaaatttgaaattttgaggagtaaataaaaggggttttttggttaggtgtagtggtttacgtttgtaattttagtattttgggaggtcgaggtaggtggattacgaggtcgggagattaagattattttggttaatacggtgaaatttcgtttttattaaaaatataaaaaattagttaggtgtggtggtgggtgtttgtagttttagttattcgggaggttgaggtaggagaatggtgtgaatttgggaggcggaggttgtagtgagttgagattacgttattgtattttagtttgggcgatagagtaagattttattttaaaaaaaaaaaattaaaaaaaaaaacgggcggttttttgattttgttaggatttttatgattgttcgtgtgttttgtgttttgtatagttgagtgaaggagtattgtgtttatagtagatattgtagatttatatatgtattattatgagttttttagtaggtagtgagagattttttattatagttggtgtattatagcgattttttaatagatagaaggaaagggtgttgaggtttttttaatagtaaggtataggttagtggttgttttgttttttattttattaagttaatttttttgggtttttatatttttatttgtataatgaggaagttggattagatttataaggtttttttttcgttgatattgtgtgaattttgtaggagttggtggtgtttgtcgattgattgagtgttggagttggtagttttgtgtaggttgttatttttgtttttttattgtgtttgtttttgattttatgtcgcgtttttaaggagaagaagtttttattagtgaacggagatttttttgaattaagaatattatggttacgttagttttattacggagtttggaagaggaggtgatttgttttatttgttttgattatttgcgggattttgtgattattgattgtggttacgttttttgtcgtagttgtattatagacgttcgttttattttagggagtcgtttcgtttgtttattttgtaagaagttttttaagaaggagaatattcgattcgtgtggtaattggttagtttggtggagaatattgagcggttgaaggtggataagggtaggtagtcgggagaggtgattcgggagtagtaggatgtaaagttgtgcgagcgatatcgagagaagttgtattattattgtgaggacgacgggaagttgttgtgcgtgatgtgtcgggagtttcgggagtataggttttatacggtcgtttttatggagaaggtcgtttagttttatagggtaagttttttttattttcgagggtgttttgttattttttttggatgttttattttgtagtttttagaggatttagtttgagtttttttttttgttttagtttagagtatttatttgttgttattgtttgtttttttataggaaaaaattttgaattatttgagtattttaaggagagatagagataaaatttagggtttttaggtaaagggagaagttgatattttggtcgcgttggtaagtgaggttgttttaggaagttttgaggcggtgcgttcgtgtagggtagggtgagtttgggtaagtaggcggtagttgggaggtgtttttaggcgttgtttatagggaggatgggtgttagtttggtagtagtagatttgggttttagtttaagtgttgtttttttgagtcgtgtagttttgggtttgttttttgtttgagagataagtgggttgtttggatgttagttagagtttttttcgttttttgtgattgttattttgaaggtagggtttatgtttagttgttggtttttttttgttaggggattgaagaaggtgtggttttatttttttttttaaagagagagagagagataaggttgtttgagagtggagagggtttagaaggagggagttggttttagggtaagaattgagagggaagggttagaaaatagttaaggtaggtttgttaattttgatggtattgtatgtagtgaggtttaggtttaggattatggttgttagtatagtgggattttttttatatttgtgggtttcgtagcggcgaatttatttaattatggattagaaatatttagaaaaaagaaaaagcgtttttattgaatatgtatagatttttttttttgttattattttttaaataatttagtgtaatagttatttatatagtatttatattatattaggtattataagtaatttagtgataatttaaagtatatagtagattttatgtaattattattttattttatataagaatttgagtatttttggattttggtatttttggggagggagattttggaatttattatttattgatattaagggataattgtagttagaaaataggtagtatattatgtatttgattagagatggggttggggggaattgattaaatggttttgattttttgggaaattgtgtatgttgaggaagtgggtagtggaggagtagtggggttagggttagtggtgagttattaggtttagggagagggaaatagtaagttagagatagttaagtttaaggatttttttaggtttttagtgtgtatggttgtttttagtttagtattagttaatagggttattgaggatttttttaattttagttggggaggagatttggaggtaggaaaggatatagtttttaagtatagacgttatataattttgttgaggaaataggatgtagttttatatggtaggggtggggtatatatagatattttagattgaatagtggggtgttgaagagagggttggttaggtttagatgatattaattaagtaaaattttttggaagaggtgatagattttgtttaggagggaaaagtgcgtcggtttatgagtgagatttatagagtttttttaggggttttagagcgtattggtttagttagaatagattgtggttgattagttaggtggagatagggttttgattatatagtggtggggtgaattgaattaatttattattggagttttttttgagaagcggagtgtggattaggaattttttgtagttttttttattttagattttgtagaatttttgaacgggggtagcgaggtgaacgagttagttttgtatatttttagtattgggttttttattttgagtagaggtgttagttttttttttttttttgttttttgtagaagaagttttaggattagaggtagtatattgtggttgagtttgagtagggttattagtttttgagggagcgggaggaatatttgttggaatagttggcgaagttggagtaggagtttacggagggtagggagaagtttaagagtcggggcgtcggggagtttgttcggttggttttggttattttcgaattggagggtaaggcgtagtagttagttgtagagtttatgtaggtgagaggtcgtttttgggtagggcgttagggattaggacggtgggttttagttttgttatttatttgtaggattttagaagatttgggggtttagttttgttatttgaaatatggagatgataatttttattgttgttaattagtttgtagattgtatgagtataaaatgaaataattggtatgttgttattttaaaaaataaattttttatataaaattgtttaaaaaattaaatggtatagtagaaaatggaagggaagattattaatattatttattattttttatttttattattgttattataagtttttttaataagttattggtagatatttagtagttggtggaagttttttatggtgttgtggttgggggtggttgagggagggttgattagtagttttttttaaagatttagaggatttggaagagatagggtaattggggaagggagatagagatggttaggttttttttggtttatgggattattatatagagaataagatggaaagtagataagggggtttcggggtattttttagaggagggggttttgatagtgagaaagggagggtttggggttgaagaattggttgtgaagttgaaatggtattatattttttttttttcgggagtttttggggattatatttattttgaagagggtttagttttttttggaggggtagagggtttaatttttttgtttttataggttgggaggggaggggttttttgatggtatttttttatttgtattgtttagggtggttgggtttgtttgttagtagtagagttatttaggatttttaggaaggtggagttttaggttaatggtagggtaatagttaggagggagagatagtaaggtagattttgtagtatgtgtattgggatagattgtagaaggaggcggttatttgttttttattgttgtgaatttagatgtatagaatgaggattggtagggattttagattttttagtttagtttttattgatgaagttattgaggtttagagagtgggaggagtttgttttaggttatggggtgggtgttaggttatagtttgagtttagatgttttgatttttgggttttgagtttttgtttttattttgtttagaatgtttttttggttttttttttttttttagatgttattttgtttttttagatttttttcgttatattttttgattgggttattttttgtatttttttttgttcgtttttttttttttttttttttttacgtttttgttatgtgtgaatgtttattgtgtggaatagaggtatatagttgaggatgtggtggggttgaaatttattgtgtttgttcggaggggtgtttttttttaatgtatttagagaagtggtttttagagtagaagtttggtttttaatgatttagagtatttagattgtagttttttttggggtgggataaggttaagggaagggagagaaaatggtgttagtttgaaattagtataggaaatgttattggtattggtaggtttttttttttgttttgtgtttttttttttaattttagtgttatataatgtatatatttatgggatgtagaggtttttgtttgtttatttttgagatagagtttcgttttgttttttaggttggagtgtagtggcgtgattttagtttattgtaattttcgttttttgggttgaagtaatttttttgtttttgtaatttttgttttttgggtttaagcgatttttttgttttagttttttaaatagttgggattataggtgtatattattatatttggttattttttgtatttttggtagagttagggttttattatgttggttaggttggttttgaatttttgattttaggtgatcgtttgttttagttttttatagtgttgggattataggcgtgagttattgtgtttggtttagagtgatattttgatataagtatataatatataataattaatttagagtaattagtatatttgttattttaaatatttattatttttttgtgttggaatatttaaaatttttttttttagttttttgaaaatgtatagtaaattatagttaattatattttttttgtaatgttgtataatattagaatttattttttttatgtagttataattttgtatttgttaattaatttttttttatttttttttttttagttttttttttaatttttaattattattattttattgttttatttttatgaatttaaatttattatggatgaatagtattttattgtgtatatatgttatattttttttatttatttgttgatggatgtttagattgagtttatattttaattattgtgaatagtgttataataaatatgagtgtgtaggtatttttttgatatattgatttttttttttttggataaatatttagtaatgagattgttggattatatggtagttttatttttagttttttgagaaatttttatattgtttttcgtaacggttatatttatatgtagaaaaatttaaaggttttattaaaaaatttttagaattaataaataaatttagtaaagttgtaggatataaaattaatataaaaagtttattgtatttttaatatattaataataaattagttaaaaaagatattaagaaagtaattttatttataatagttataaaagtaaaataaaatatttgggaatgaagttaattaaggaggtgaaagatttttttaatgaaaattataaaatattgatgaaagaaattgaagaagatataaataaatggaaaaatattttatgtttgtggattagaattaatattgttaaaatgattgttttatttaaagtagtttatagatttaatataatttttgttattaaaatacgaatgatattttttagaaaaatagaaaaaaaattaaaatttatatggagttataaaaaattttaaatggttaaagtaattttaagtaaaaagaataaaattggaggttttatattattttattttaaaatatattatagttagttgtggtggtttatatttgtaattttagtattttgtgaggtcgaggtaggcggattacgaggttaggagtttgagattagtttgattaatatggtgaaattttatttttattaaaaatataaaaattagttgggcgtgatggtgcgtatttataattttagttattcgggaggttgaggtaggagaattatttgaatttaggaggtagaggttgtagtgagtcgagattgtgttattgtattttagtttgggtaatagagtgagattttattaaaaaaaagaaaaaaaaaaaatatatatatatatatatatatatatatatatatatatatatatatatatatatatatatatatgtatatatatatatatatatgtatatatatatatatatatatattataaagttgtagtaattaaaatagtatgtattgatataaaagtagatatatagattaatggaatagagtagagaatttagaaataaatttatatatttatagttaattgatttttaataaaggaattaagaatatataatggggaagggatagtttttttaataaatggtgttaggaaaattgggtaattaattatacgtagaaaaatggtattggtagattttgtttgtgtgtttatttgagtttgattgtattgcgtgggaattggatagttatttttttaattagtattaatatttttttagagattatttggttgttaaagtatagtaagaaaaagatttaaaatagggtttagaagtttgatagagaaatataggtgaggttggtgtggtgatttatatttataattttagtattttgggaggttgaggtaggtagattgtttgaatttaggagtttgagattagtttgggtaatatagtgagattttgttttaaaaaaattaaaataaaatagaaatataggtgagagggagaagtagtaggataaaatgtgtaaaatagaagagattttttgatagaggtgataggaaaggaaagataaatttatgggttgggagtattaagaagatattaaagggattggggtgataggagaggtttagagagatattgtattttgttttggtaattcgggtaggttttgtaggattaggtggtatgtttgtattttgttttttttgttgtatattttcgtgaagaatttttttgatgttttttgttagtaatcgggtatatttttttcgggagtttgttatgatttattgtcgtagttttattgttcggttttgtttgttttatgatagttttagatgttttgggtgagaagagttttttaggagatttgggcggattatttttttttagaggttttgtatgtggttgtggatgggggtttttgagttttttagtttttttttcgtagggttagttttgttttggttttcgggatttattttttttgggttgtttataatttttaatttttagaggattttttttttttttgtatgattttttttttttttattgttttaggaatttttatgttaggaaatatgtttaaatgggtttttggtttatattttagttattgttttatttatttgtttttttatgttatttttgttagtagagttgttaggatatattgtttgttttgttgtttgttttttgaagtcgttttggatttatatgttttgaggggtatgttagaggatttggttagaaatgtgttattagtttttgggtatttgttttatagcggggggttgggatgtgtttttgattttttgttttatttttttggagtaaagtttataattttttttaaatttttggaagtagttattagtagttataatttgttaattttatttgttttttaaattttattttttttaggaagttagtttgtattttatcggtttttgtttttatttttttttattttgtttttttttttcgtggtgcgtattatttacgtagtatgatgtatttgttatattgattattgtttgtttttttttgttagaatgttagttttatagaagtagggatttgttttttttttttttttttttttttttttttaattgttttgaggtttttagatgagtgtttggtatttaggaagtatttaataaatatttgtggaatgagtgaaaggaaggtaaaaattaattaatatagggtattaaggaggtttttgatttataaaagggaatttgagtattttagaatagttttttttttatttattttgttttattatttgtttgttatagagatagtattattatttttttttttgtataaattatgttttgtttttgtttatttttgattagtatgtttagttgaatttgtttttaaaatatttggaatgtattgtttttttttttttttttttattgttattattttagtttaggttatttttagtttttttttggtttacggtaaaagttttcggattaatttttttatgttttttttgtttttttagttttttttttgtggggtagttaagtgagtggttatttagggttttggtttattgttgtatagtgacgtaaatagaatagaagtttatttttgttttagttaatagtttagaggtgtagggtttagagttattatagtagttgtatataagtttatttaagggattgggttatttttatgtggtttttttattagtttttagggatgttgttttttgttgcgtggttaaagttgggtttattattattatgtttaaaatttagttggggtaaaaaggaagtagaaagtaattttttttttttaaaggataatgtttagaattatggttattgttttttattatattttattggttggaatttagttttatgattagattttgtcgtaggggatttggaaaatgtagtttttttaggtggtcgtttgattagtaataatttcgggggttttattattaaaaggaggaaggggagagtggattttggaggttatatagtagttttagttatatgtagagcggattatatatattatgtttttatttgaaatttttggtgggtttttattgtacgtggagtaaaagtgaaattttttattatgtatatttagttttgcgtagtttggtttttgtcgtttttattaagtttttttttgttttattttatttttttttattcggttagtattttttattcgttaattttttgcgtaggtattttttagagaggttgtttatgttattttttagttattgtggtttttgttattgtgtcgattttgtttgtttttttgttgttttatgtagtgattttattggaatgttagttttataaaaaagggattatatttgttttgtttattgatatgttttatttttgttatagtgttgggtgtagatgtattgaagttttatttgatttatattgatatttgtgttttttttttttttttttaggatacgagagattttttaaataggtaaaagagttttttttttatggcgtattttattttttttgtttatgttttttcgtttttgattaggtgtatttgaatttatggggagtggtatggtgttagaggtatttatattttatggtttattttgatgtttttttgaggagtaggatatattattgagaattggagatttgtttttttttttatgagttttttgtgtagttttagttttttggtttattggttttatttgaggtgggatagagtagagaggttagaaatatggtttagtagatagagcgttttggatgtggagtttattgatgttttgaagttttggtttagttggtgtttttgggttattgtttttttgttatttgtttggggataattatatttttttttttttttttataattgttatgaggattgagagataagtatgaaggaaagtaagaagagttgagtaatagtttgttatgtatgttatttttttaggtatttacggaagaagttttgggttgggaaatttattgttcgagtggttaaaaaaaagatcggagaatttttagataaatttttttttttgtaacgaggtttgagggaattttagggtaagggttggggagcgtataaagggtgggagttagagtagggttatttcgtagaaagagcgtatttagtttttttttattattttgtcgatttttatttttttgagggttttttgttttagatatggatttttattaggaaattgatattgttcgagtaagaaatgggtttataaattttcgggatttgagttattgttgtttttttttttttttagggaagttgttgagagatttggaatataagataggtgagtgtttagagggtgttttttagatgtatattaaatatagaaaatttcgtttgtagagattttgattgtttattttttttttaggtagttttttttgtaataggaagaattttttagttgtataatagaagtttttttttttttttgtattttttaattagtttattttttagtttgtagtagaggtttttgtttgttagtttgatttttttttgttttgtgtttgttttttttttttttatttttataggttttattattagttttttttttgtggtcgagtttttttttatttttttggttgtatggtttttatatttagagtaaatagtaggggtaatttaagattagaggttatatttattataggttttattattgtgtttttttttagttttgtagttaggttgtatattgtatattaattattaaggagcgttatttatatagattaagatgtgaatggtgttttttggattgtgaagattggtggtttttttttggtttatttttatatttgttttcgtgagaattattgaggaggtcggtttgtttgggagtaaacgaggttttgagagttttatttagtttataggataaaattttatagtagaattgagttagtagtggttaaattttaggtggttgtagtttttttattaatgtttgagttgtttgtgaatatcgttaaattttatttattaggttattttaattatagagaattttatgaggatgatggtgaggattattttattttgttagtatttgtttagggttttttgaattattttatagagtaggttggtagttttgaaattgaaattgaatagtttatagagattttgaatgtttgtgttataatagatgatgttttgtaagaatttgtggaatttagaggttatatttgttttaaatttttttttttttttttttttttttttttttttgatacggagtttcgttgtcgtttaggttggagtgtagtggcgtaatttcggtttattgtaggtttcgttttttggggtttacgttatttttttgttttagtttttcgagtagttaggattataggcgttcgttatttcgttcggttaattttttgtatttttagtagagacggggttttatcgtgttagttaggatggtttcgattttttgatttcgtgatttatttatttcggttttttaaagtgttgggattataggcgtgagttatcgcgttcggttttttttttttttttttttttgagatggagttttgttttgttttttaggttggagtgtagtggtgtgattttagtttattgcgagtttcgttttttaggtttacgttatttttttgttttagttttttaagtagttgggattataggtgtttattattatgttcggttaatttttgtatttttagtagagatggggttttattatgttagttaggatggtttcgattttttgattttgtgatttattcgtttcggttttttaaagtgttgggattataggcgtgagttatcgtgtttagttttaaattttttttatatgggagtttatttgtgtaattatttgatattatttgatagttagtatagagagtagtatttttcgttaatttttattttaaagatatcggattgaatatgatattaaagattaagttgtaaaaggggatgaagttattttaaaataattttatgtatttgtattttttttgggagagttttattataatttggagattagaggaataaatggataggttataagggtagatattttttaggttggttttgaggagttgtcgaatgttcgaatgtttttttttttaattttatggatgatagtttaatttgtgtaataaaattgttgaagttgatagggttagttttggaagatgtttggaaggaaaaggaaggattgatatggaagaaattatttaggaaattgaaaatgttgttatagatgtaagttgtggtagagatatgaaatagatgtttttgaagtttgtagaattttagtgtagtaattggggtagagtttatgtaattttattatatagaaatataatagttaaaaaagattttaattattatgtgaatgaattaatattttatagtggttatttatatagttattgtgttttatagtgttttttttattgtagttgattcggattattaagaagtatattaagagttatttgaaaaagaggattttttttttggattatgaagaaaatggaatagattttttagggattggtgatttatatttggatgatattaatgatgagttggatttagagatttagagatagaggaagtttatgaaaagttttgtttggaattagagcgtaagcgaaaatagttaagttaaattttagtatattatgtttataaagtagtttagttatggtgatttagtagaatataaagttagaaaatgtgttatatttatattaaattaaggatgttgagttatattattaatgtatgtaattttaattttgtttaacgttatttgttaaaataaattttattttttttgatttaaaaaataaaataaaatagtgatgttgttttttttttttttttttgtttttatagtgagcgttattttggatttatagtcggttagtgggtatttgtagttgttagaggattggaagtgcgtgatttatattagtttgtataagagtgtttatttgtatttttagtagtttgattgtgagtttggggtgttgggtagtaagggttttatttggggtaaggtttattgggaagtggaagtggagagggagggttggtttgaggatgaagaagagggggatgaggaggaagagggagaagaggaggaggaggaagaggaggtcggttatggggatggatatgacgattgggaaacggacgaagatgaggaatcgttgggcgatgaagaggaagaagaggaggaggaagaggaggaagttttggaaagttgtatggtgggggtggttagagattttgtgaagaggaagggagatttttttttgcggttagaggatggcgtgtgggcgttgcgttttttttttttcggtatttgggttaatattagtttcgaggttgagttttttttagtattgcggtttcggagagtgggtatcgttttggattatgaagggggtatcgtgatttttattaacgtagagttataggaatttatttatatttttattgttatttttattcggcgtttggttttttttttgtggtttaagtggttaggaatacgttttttgttaagattttgagttttgatatttgtttttagttttaatttttagatgttttatttttttggaattttaggatttttaatggggggacgggatgtttggtttaagtatttggagtaggggattttatatttattggtagttatttttttattgttgtggttttttgaaattttatttagtgttgttgttttatttattgttttaatggggttttttttttattttttgttggtttttcgagggaatttttgattttggagtttatgagggttttttttttttttgattacgattttggttttagttttgtattttttggaataagggttcgatgtagtatttttttgtttagtgtggtaagattttagaaaaattagttaattacgtttaagattattttgttgtttttaaattttttaggtttttttttgtataaatttattttgttgtttattttttttggtattttaaatagatttattttattttaatttagagttaagtatatatggtaatgttgaaaataaataaaatttattgaggttttttaggttatttaaagtttggagtattagcgtatattattttatggggtttagagtggagtttaggtttttttgaaattagggttgagtatatttttatagttaaggaggtgggattttttggagttatttgtggttttagggaaggatttagatatatacggttttggggtataagttgtgattattgattaataaattatttttagattggtttttgtgaggggagttttaagaatttagaatattttgtttttgattagtatatttaaaaatattaagataaatatttagtggagtagaattttttttgtttcgggagttttgatcgggttttttagtagggtgttaagtttttgtttttggttttattagtatttaggttttatttttttaggagagagtggagatgggaagatagggaaaggaaggtagtaggaggttataagtttattaggtttttatgttaagagagggagtaatatgtttttttattgtttacggatttaatttttgtttaggtgttttttattattatagtttaatataagtttttttgttttagttaaattgattttttagttttgtttttatttattttaagtgttttgttagtttttgtttatttaagttttaagttttttattttgttataagagattgttttaacggttttgggttttagtggttatttgattattattgttttagagttgtttattttgtgtgtgttatatgttgtttgagttatatgtatattttatttttgtttttagttttgtaagtttttggagggcggataatattttatattatttttgtatttttatggtatttagtgtagtgttgggtatagagtaggtgtttaataaagatttgttgaatgaatagtttggagatttgtatttgtaggtttatatttatattatattttaaatgttattagattttagtttggttatagagaaattttattgatagtagtagtcgaaggttttttttttgtgttttttgtaatagtgtaattttgttttttgttttttgtatatatgttgttatttttggaagttttttaaaaagagtttattgcggaatatagacgagttgttgcgtggttttatttttttattttttttgtagtggtgtttttgagttgaggtttagcgttttggagtaagtgatgattttttttgagaagggagatttttagtatagtatatttaaaaatttttttttggaaaataagtattgttttagaggaaatagaatgtgtagagatttagttttgtattttaatatagttaattgttttttttgttttttttgatttttttttttttttttttttttttttttgagatggagttttattttgttttttagtttggagtgtagtggcgttatttcggtttattgtaagttttgtttttcgggtttacgttatttttttgttttagtttttcgagtagttggaattataggcgttcgttattacgttcggttaatttttttgtatttttagtagagacggggttttattatgttagttaggttggttttgattttttgattttatgatttatttatttcggttttttaaagtgttgggattataggcgtgagttatcgcgtttagtagttttttttgattttttaaattgttattttaaagatggaaaagggaggattatacgaaattatttgtaaaattacgttagtggtaaagagtatattttttttttgttttttaagttgtgggtttatgtaaattttttttttttattttttatatttatagttttttattttgtataattttatttgtatatatggtaaattttttatagtgttttttataaataggaatatttttttgttttatatttttttttaaagatttagtttatattttttagtaaattattttgtgtttgttttgttgggattataggtgtgagttattataattggttgaatttttattattttagagatatggttttattttgttatttaggttttagtgatggtgtattcgtagtttattgtggttttgagttttggggtttaagtgatttttttattttagttttttaaagtattggaattataggcgtgagttattgtgttttgtttgaattattttttgttgatttttttttttattttttgtatttttttaaatttgttatttttaggttttatatgttttttgaatttatttattaagtattcgtgatgtgttaggatgtttttaggttataatagtgataaggttaataaagttttgtatttttggaggttatattttagtaaatggtgataggtagtatgttaaaattgaaaaaaaaaagtaattagtattatgtaaggaagtgaaataagtttgtgatagatagtgatttagtatttattttataatgtgtgattagaagggagttttttgaaaagatggtatgagagttgaaattagaatggtgagagggaaggtttaagattatattagttagagggaatagtaaagttttaaagtagggataaattgggtatagaaagagtgtatttagagtatggttatgggagaatagaaagagttatagatttttttttttttttttaatagagacggagtttcgttttgttgtttaggttggagtgcggtggtatgattttggtttattggtaattttcgttgtttaggtttaagcgatttttttgttttagttttttaagtatttgggattataggcgtatattattatgtttggttaatttttttgtgtttttagaagagacggggttttgttatattgattaggttgtttatgaatttttgattttaggtgatttatttattttggttttttaaagtgttgggattataggtatgagttttaaaaagaaattttttaaaaattgatgtattttaagtatttagaataatgtttattatataagttttgatttgaggtcggattgatgtggcgttgttgttgttgttgttattgttgttatttggtaaaaaagagatgggagattgagtatttttatgtatttttttggataaattttatcgttattgttataggttgttgtgagattagggtttgagaagattgtattttttgtggttatttgtttttgtttttttatttgagaggggttttgttttttcggtggtaaatttgtagttattattttgagagtttaattattcgggtttgtattttgtttttgggtttggttggggttgttgtcgttaagttaaggttaagttgaggagggagagtagagacggggtattttcgtacgtttttaggataaattttattattgttgttatgggttggtgtggataaaggtgtgagtagatgatattttttatagttatttgtttatgatgcgttagttgagagtggttttgttttttttggttgtaggattatagtgtagttattatagttagtttatatttgagtattttgttagtggtttggggatttttttattttttgtttattatagttagtatttgaatgtattgtagggggttttgaggataggtttgttggtttgattttatttttttagtatataagtatattatttaggggttcggaaattgtttagtttaatttattattattggtatttgaattatttttgttaggatttgaggttagtttaatttaatttattaatattattataattgatatttatttatatatgttattagtgggttagggtattagtttgtttaatttgttatagttattattaatattagtatagattgtttgggttttagtaggttgttttattattgttattgttattatttattttatattagttgtttaggagtttgagaagttgtttatatgtttggtttattgttgttattgttagtatttgagtaagttatttgaaggtttaataattggttttttaagatttattaacgttgttgttagtttaagttattttgtgggttttagtataggtttatttaatttatcgttgttattattagggtttgaagattggtttatttagtattttagtttttagttaaattttattatagtttttattaataagtgtattttaagttaatgaggaagttatagatattattgatgttgtatattgttaaataaattatatagggattatattattataggtatttaaaattaaagttaaagtattttatttaataaataatacgtaaaatttttaggaaaaaaatttttttttatgaaagtaattttaaaaatggaagaagtgattgttgtaattaaatgtgtagatattaatgtaaggatatagaaaattaaagaataaagaaatatgatattaataaaggaatataatatttttttagttatagttattaattagaaagaaatttatgaaattttagataaagaatttaaagtattgattttaaagaaatttagtaggttgggtacggtggtttatgtttgtaattttagtattttggaaggtcgaggtgggtggattacgacgttaggagattgagattattttggttaatacggtgaaatttcgtttttattaaaaatagaaaaaattagttgggtgtggtggtgggtgtttgtagttttagttagtcgggaggttgaggtaggagaatggcgtgaattcgggaggcggagtttgtagtgagttgagatcgtgttattgtattgtagtttgggtgatagagtgagattttattttaaaaaaaaaaaaaaaaaaaaaaaaaaaaaaaaaaaaaaaagaaatttagtgatatataagagaattttgaaaaataatagaaagaaaaaagataataatgtaggatatgaatgagaaatttaataaagtaatagattgttttttaaaagaaaaatagaaaatttggatatgaagaatttattaaaggaaatataaaatatttttgaaagttttaataatagaattagattggggagaagaaagagttttagagtttgaaggtagtttttttgaaataatttagttagataaaaataaagaaaaaataattttaaaaaatttaatttattttgtttagataaaaaaattagtaaagtttttatgatatttgggatagtataaagtaattgaatatatgaattgttagtattttcgaggatgatgaagaaatgaaaggattagaaaatttatataatgaaataatagatgaaaattttttaagtttagtaagggatttggatatgtaggtataggaggtttaatgttttttaggtagatgtaatgtaaagggttttttttatagtatattataattagattgtttaaagttaaaataaagagtaaattttaaaaatagtaatagaatagtgtttagttatttaaaaggaaaatttattagattaataaatagtggatttttttgtagaaattttataggttaaaagataatgggatggtatatataaaatgatgaaagaaaataattgttagttaagaatattagatttagttaaattaaagtataaaggaaaaagaaataaagttttttttagataggtaaatattgagggaatttgttattattagattagttttacgagaaatgtttaagggagttttaaatttggaagtgataggatgatatttattattataaaaatatataaaagtataaaattcgttagtaaagtaattatataaaggaagaagagaaaggatttaaatggtgtttttaaagaaatttattaaattataatgataaataagaagaaaggaataaagaatatataaaataattagaaaataataatatgataggaataaagttttatatattaataataattttgaatgtaaatggtataaattttttatttgaaagatgtagaatggttggatttatttaaaaagataatatatttgtaagttgttttaagaaatttagtaaagttttttattagtaaagataaatatagataaagtaaagggatggaaaaagatattttatataaatggagataaaaagtgagaaggagtagttatatttatattagatataatagattttaagttaagaattgtgaaaaaaaaaagttaaaaatgttattatataatgataaagggattaatttagtaagaagatttaatagttttaaatatatatatattaaatattagagtatttatatttataaagtaaatattattagttttaaagagagagatagattggaatataataatagtgggggattttagtattttatgtttagtattagatagattatttagatagaaaattaatagagaaatattggatttaaattggattttagattaaatgaatttaatatttacggaatattttatttaataattgtagaatatatattttttttattagaatatggaattttttttaatatagattatatattaggcgataaaataagttttaataaatttttaaaaattaaaattatattaaatatttttttagattgtaatagaataaaatgagaaattaatattaagaggaattttggaaattatataaatatatagatattaaattatatggttttgaatgattattgggttaatgaataaattaagatagaaggttaggtatggtggtttatatttgtaattttagtattttgggtggttgaggcggatggattatttgaggttagaagttcgagattagtttggttagtatggtgaaattttgtttttgtgaaaaatataaaaaaattagttgggcgtggtggtaggcgtttgtaattttagttatttgggaggttgaggtaggagaatcgtttgaattcgggaggtggaggttgtagttagtcgagtttatattattgaattttagtttgggagataagagtaaaattttatttggaaaaaaaaaaaaaaaaagaaattaagatgaaaattaaaaaaaaaatttaaaaataaatgaaaatggaaatataaaatttgtgggatttagtaaaggtagtgttaagaggaaagtttatagtaataaatgtttatattaaaaaagtagaaagattataaattaataatttaataatgtatttgaaggagttagaaaagtaagaataaattaaattttaaattagtagaagaaaagaaataataaagattagagtagaaagtagagatttaaagaaatataaaggattaatgagatgaaaaattggttttttgaaaagatatatagaattgataagttattagttagattaattaagaagatagaagatttatatgaataaaattagaattgaaaaaggagatattataattgatattatagaaatattaaagattattagagattgttataaataattagataaaattggaaaatttagaggaagtggataaatttttggaaatatataatttattaagattgaattagaaaaaaatagaaaatttgagtagattaataattaatagtaagattgaattagtaattaaaagttttttaaagaagaaaagtttaggattggagggattaatagttgaattttattaaatatataaagaattaatatcgatttttttgaaattgtttaaataagttaaagaggaaggaattttttttaattaattatatgaggttagtattattttaatattaaaattagatagatatattataatattaataaaaagaaaattataggttaatatttttaatgaatatagatataaaattatagatagatataaaaatttttaataaaatattagtaaattaaatttaatagtatatcgaaaaatattatattaaaattaagtgggatttatagtagagatgtaaagatgttttaatatgaataaataagtatgatatatattattaatagaatgtagaataaaaattatatgattattttaatagatgtagaaaaagtatttgataaaatttaatatttttttaagataaaaatatataatatattaggtatagacggaataaattttaaatttaaatgagttgtatgtaataaatttatagttaatatgttgaatgaggaaaagtggaaagttttttttttaagtattggaataaggtaaggatgtttatttttaatatttttatttaatatagtattaaaattttagttataaggattaggtaaaagaaagaaatataatgtgtgattttattaaaaaatttttagatatgataaatgagtttagtatagttttaggttataaaattaatatgtaaaagttagtagtatttttttatattagtaatgatttagttaataaagaaattaagaaggtaattttatttagaaatttttgttattaaaaataatttaggattgaatttaattaaggaggtaaaagatttttataaggaaaattataaaatattgttgagagaaatttaaaataatataaatggaaaaatattttatgtttatggattagaaggaatattaatattattaaaatgattatattgtttaaagtaatttgtagattaaatgtaatttttaataaaatattaatattattttttatagaatttgaaaaaaaaattttaaaatttatatggattaattttttttttttaaaaaaagtttaaatagttaaagaaattttgagtataaagaataaatatttttggattaaagggagtttagtaattaatagattagtaatatttgttattagagatatttttgttaggtttgttaaatattagatggttataggtgaaaattaaattaaaattataatgagatattatttcgtattagttaaaatggttattattaaaaagttaaaaagtaatagatgttggtaaggttgtgaagaaaaacgaatgtttttaatattgttggtgtgagtgtaaattagtttaattattgtggaagattgtgtggtaattttttaaaaatttagaggtagaaatattatttaatttagtaattttatttattgggtatatatttaaaggaatagaaatcgttttttataaagatatatgtatgtgtatgtttattgtagtagtatttataatagtaaagatatgaaattaaattaaatgtttattaatgatagattggataaagaaaatgtggtatatatatattatggaatattttatagttataaaaaggaatgagattatgttttttgtagggatatgaatggaattggaggttgttatttttagtaaattaaagtaggaatagaaaattaaatatagtatgtttttatttataagtaggatttaaataatgagaatatatggatatatggtaggaggcggggggaataatatatattgggttttgttggagggcgggggtgggaggagggagaggattaggaagaatagttaatgggtgttgggtttaatttttgggtgataggatgatttgtgtagttgattattatggtatatatttatttatgtaataaatttgtatattttgtatatgtatttttgaatttaaaagttgaaaaattttttaaaaaagaaaaatattagggagtagttgtttttgggagtgaggagaatgggaataaaaattggggagagaggagaaaatataaataaaattagaagattttgtatggattgatgatgatagtgttttaagaattgagaggtatgattgagttaatattttatattggaagtttgaaagaaggaaagaattgaaaatgaaaaagaaaataaaggttatgagtagagttaggaagtttttttatagataggagaatgggttttatatttagagtaaagtaagtcgattagagagataatgtatttgtttaggttttagtttttattataattagtttattgttattacggtttttgggttttagagagatttttttataggttttattttggtttttataataatttttttggtttttcgaggtatattagtgtgattgttttttatatagtttagtagtttagtaattattttgtgggatttttttgttttttgtttagtagtggatagaatttagtatttggaatttaggaatatttataaaaagtattaggggtaaggtaggttgtgtagaggattttgtaggggagatagaggatagttttatattataaatataggaatatagttattttgtggttttagttggattattaaatgaataatttttttttgttttttttttaggtagtttttagtttttattttgaggttttagttatttttaaattttttttggtttttaaatttttttttttttttttatgtagaataatttattaatataggtataaagtttttaaatgtgtatatttatatttttaaattatttggattattttaaaattagaagtattagagatttggaaatatagtgtgtttatggtttatcggtttttttttttttttttttgttttatatgaaattaaaaatgttttgtttaaaatatgaatttaatgggtagtaaatgaaatatagttttattgggatgtgtttgttttagaagtttgagtgtggtggaaatgtgattgtattgagttttaggataggtagattttattttagtaggttataaggattagttgtgaaaattgttagataagtttatttaattgtgtgttagtttttttaattattatatgagaaaaataaaataggttttatgtattttataggtttgttgtaaggtttaaatgaagatataattaaaataaatttgattaatggtataattagtatgtgttgtatatagttttttttttggaggggttgtaaagaatatttatggtataatttaatttatgtaaaaaaaaaagagaaagtaatatatatttgtatttaaaatttgtaggatatataaaaaattgatattaatgtttaattatggggagtggtaaggggaagtgttgagtgggtggggaaagaggtttttatttatatattttgaaaatgtttgaatttttttaattatgagtatatataatttttataataagtattgggtaatattattattattattattattattattattaggttggattattaagttatttgggttagataaggatggttttgtttattatattggggggtagaagaaattttatattgtttggttttttttatattaagaatttttatttttttaatagttaagttagggttaattatttatattatattgatttatgttataatttttaaataaaatttatatatggtttaaattttttgagtgtttttaaaatatttgatttatgttttaggagtagggtttacgtaataatgaagatgttttttgttttatttgtttgtttgttttttggagatagagttttattttgttatttaggttggagtgtagtggtataattttagtttattgtaatttttgttttttgggtttaagtgatttttttgttttagttttttaagtagttggtttgttattatatttagttaatttttgtatatttagtggagatggggttttattatgttggttaggtttaaatttttgattttaggtgatttatttgtttcggtttattatcgtgagttatcgcgtttagtttgttttttgttttttgtttttttgagatggagttttatttcgttattcgggttggaatgtagtggtttgattttagtttattgtaattttcgtttttttggtttaagtgatttttttgttttagttttttgagtagttgggattataggcgtttgttatttcgtttagttaatttttatatttttaatagagatagggttttattatgttgtttaggttggttttaaatttttgattttaagtgatttatttgttttagttttttaaagtgttgggattattggcgtaagttatcgtgtcgattttaaagtgtttttgtatatagggtattgttttatattatagggaatttggattggagttgaaggtagattttttttagaggttggggtggaagggtgagaatgtgagtgtttaatttgagaggagaaagggtaggggtggaaggaaatattatttgtatagggattaatattttgttttttaaagttattttaatttgtggtttgtttttgtgtttaaataataattgtagtaataataaatatttgagaggttagttagatttgagtaaaagtttcgttttattaaataatggggtttggtgattgttttattgtttgttattagggatattttgattaaaagaagggataggattgtgttttggttatagagggattattattttttttttttgtatttattttttcgagttatttcggttttaaattgttaatataggtagattttattggatttaagtttttttttagttttattagcgttaattggatatatggaatttagaggtttgtgagttatatttttttaggatattttttataagtttagagaaatgattagaagggaagggaaaggaaggggttttggggtttatttagggttgataaaaaggttttaagttttataaaggtggaggtatttttaggtgtgtgttaaagtacgaagttaattgtataaattagtgtaagtttagtaaaattttgattttttttaagataattattttgaaatagtttaaatattttattttagatgtttttttttttttttttttcgaaagttcgttggtttttaggttggttgttgttttaggtatagtcgaagtcgtttgtggttttgtattttgaggtgtagagaaggttagagcgttatagggaggtttaggacgttagggagttgagggtttaagataaataaagtaaaaataatcgttgttcgagatttaagttttttgttttttcgttttacgcgggtatagggagttttcgggtcgtatattggttaggggcggagttggatttcggagagtcgtcgttttcgtttcgtcgtttttcgcgcgttttattttagttttttagcgtaaggtaggaattttttttttagacggtaaagaaagggaagattttgtcggagaaagaggtagtgaaggtgaagatgggtttttgggtttgggcgttgtggagggttatttgtttcgtttcgtagtttagggcgatttttacgtcgcgcgggatttcgtttagcggtaggtcggtgttcggggaggtgttggtttagtattgttggtgcgagatgattacggtttagacgtcgttttcggcgttgagttttatttttttttttttttttatttttttttcggttatttttatcgtgtagtcgtcgtcgtcgtttagttgtaggttaatttgttagcggtggcgttcggaggagaagttcgggaagtttagaatcgtcgggaggtcgtcgaagcgtagggggttgtttggtaggttttttttttgtcgggtgtattttattgattttttgtttttcgagagaattaggtttcggttggcggtttgagggtttagagtgatgatttttagagggaggagcgcgtagatattaatagcgggcggtaattatagatgtttttagagtaggtaacgtacgtgggaggtagaaggagtattggatttgggtagtttgttattgggttatttttttgaatcgtttttttatttaattagtaagtggtgttgttaaggatttgttttttaaagtgtagcgggagggattagtagtatttttattatttgggtgtttgttagaaatgtagaatattgggttttattttattttattaaattagaatttgtattttaataggatttttaggagacgtttttgtatattaagtttgaaaagtatttatttatattagagtgagtgaggtgatgtttatggaaataatttttaaattaagtattaatttaaaaataaatgtgatttttaaaaaattgtatattttttgtttaaattagtagagagtttagtataatgtttttaaaaaattagggtttgataagtattttttaacgagtaatatttatataagtagatgatattaattgagtatttattatgagttaggtaatatattaagttttttgtatgtattaatttattttgtttttatagttatttatgggataggtatagtatttttatttttattttattgatgaagaaaatattgtgggatagaggtttaataatttgtttagtgttttagagttagtaagaattggaatcgagaatttaagtaattaagttttagaatttatgtattttattgttttgtttgttgttatggattgaatggatgaatggaagaatgattttttaaattttaagttgtttatttgaatttatttttagatgatgcgttaagttttttgagggaagtagaaatagaaagagagatttgtgatttattattttttataggtatttttaggggtaaggtgatttgagtataatgtgaagatgaggatagaagattcggtttttgttgtggtttagtggaggagaagggtttttatttttttggatttttagttttgtatttgtttttagggagtggaggagatgttttgggaatagtgtttttgaataaattgagattattaagggaaggttttggggagggaagatgtttcgagttaggttttaagggtagagaaggatggagatgggtggaagataggagggtagttaatgggattggggaaaattgtggcgtttttttttttatttgagaatatttttattatttttgggagggtgagtatttttttgtggaaattacggatttttttgataaggttaggagaaatggttttaggatttataaaagtttttattttatatttgtagataggtttggtaattagttaggtttaaattttaaaaataaatgttcgggtgagattacgtgaggttaaaattagattaaagaatgattttggcgtttgtggtgaataattaaattgagtattatttttttatttttgttggaaatgtgtagttattaaaatagtaggtattttagttaaatttaagaggaattaaggataattattttttaagaattggaggtaagtttttttaggagaatgtttggttttgtaggggttgagggatagagattattattttttttggtttttagagggtaatagggtattatttgaaaatagttttaaattatttttgtgtatgttgttatttgtaaaggaaaagaggttagaagggaagaaaaaaaaaggattaacgaaaatatatattgtaatgaaaaaaatttttgattttggttttagtttagtttttattagatatttgttgtattattttgaagattttttattttttgggttttagttttttttttagattggaagatttttaagtttttttagatttaaatttttaatgttttttgaaaagtatgtttggagatattttttgatttatggattttgggtttattttttttgtacgggaataggtataaagtacgtgataattgttttttagttattatatttttttttattttagtgtagattgttaatgtttatagtagatagggaaggaaagggttatgtatttataatgttattggtttttggtggttgtttttttatagtagtattagaaaattttgaaggaaattagagatgtgtgtaaaaaatgaatgaatgaaagaataggttggtatttttggtttttatgtttattatagtttatagaaagtattttttttttaaattatattttaaatggtgttagatattgatttaagtattaataattttatagattaaataaatgtttttggattaatttaaaaatatgattattatttataattttatttttaggggaaaaaatgtgtttttaatattaattaattaatttaaaaatgaatttttagaatgtaaatttttagtgagtttggattgtttgtgtatagttgaatgagatagtgtgtttgttagagtgtttttgtttttttggtaaagtgggtggtagtaagtgtttttgtttttttttatttagttttgatgttgagtaaaaggaggtaggatcggggagtgggttttatttgttttggttgattttgatattttgtaaaagaaagataagaatatatatttagtttttataagttttttttgttagggattttgtatattattttttttttaaaatatgaatttaaaattttttttttgtagagagttgttttgtttaattatttatttattagattgtttttttatattatgtttttttattaatttgggtttttgtagttagtttatttgtgttggtttttttgttttagttttatcgtgggggtgggttgtgtttgtaatgattaggaggtggtagagagtaggggtttgtttttagttattagttggatttgatgtgagttaggattatatatttataattatagtagatattagttattgagttttttttgtatattaggaattatgttaagtattttttatggattgttttttataattttgtaataattttatgagggaggtgttattgttgtttttatgtttagagaggttaagagatttatttaagttatataattggaagagttaatatttaaatttaagattgtttgattttaaattttttaatatgattatagtgtatgatttgggtaagtttttagtttttttggatttgtatttcgttaatttttttttattttttttttttgtttttttttagtttaaagtatggtgtttattttttttttcgtggagttttttttttattttataaagtggtgaagtgttttttatttgtagaagtttatttgttggttgttgatattttttttttagttttttgatttgggttttaagtcgggtgatttttttagagatttttgtgatatatttatttttttttttttaaatttgttgttttagtttttttagtttggttagtaggagatatcgttgttgttttagtttttgttgtagttttttaaaagttgtttttatttgatgttttttgttttcgatttgagtttttaagggataaaaggtagatatggttaggaaggggtttagagatagtttttaggatgattatttatatatttattattgattaatagggatagggagtaattggtttaagatttattttatttattaatatgtttagaagtagttaggttttaggatgaatttattaatgatgagggttgtgttattgttttagttagatattttaataataatgttatattatgtttttagaatgatgttgaattttttaaaaatatttttataattataatattattataattttattatgtttttttagagttaggtggggaagattgtaataattttttagaggtaaaaggaagttgtgattggagttaatataatttagtgggagagtgtgtaattttggttttagtcgtggaaattattaattatagggtatacgttgatgagagttgagggatggtggataggttgttttgtttttatattttttttttggttaaggtattagaaatttttatattgtgatttttttataattttatagtatgaaaagagaggcgtgagggatttagatgtagttatattattagtttattttttttaaggttagtttgtagttaggattagaatttcgatattaatatatgtttttgattttaagttttttatttgaaggtggtgtgtttaggtaaatagattaggatggaaagaataatgaattaagggttaagaaatttaggttttttatgaattttagttttgttatgtggttttgggagtattgtttttttggttttaagttttttgttttgtaaaatgtgatatataagatggattttggattgtaagatattagaattatttttagtgtttatggtttgagattttaaatgtttttgtgtagttataggaaggtgaacgagaatagtttgttagttttttttagttaggaaatagatattagttaacgggtttttttagagttttttaagaaaatttttaaaggaaaaggtagttagtgacgtggtttgtattagtagtatttgaagtttttggtttttttgatattttatatttttaattttattttttttcgtgtttagagtttttagtcgatttttgagacgattttgtggggagaagaatgggtggatagaggtgattgaattaataatttaatttataattattaattattatattttgggtatattgttgagtgttgaggggtttaaaggtggaaaaggtttagtttttgttttaaagagattattattttaggaagaagttaatgttaagtgattaaaatatagatagataaatgtaatagtttaggggtatatatagtgagatgggaatatagaggttagttttgtttgtaggtttaagggaaggtttggaaagtagaaaatatttataatgtgttttgaaagataaatttttagttgaatagagagggagagaaaaggatttagtgtttatagatgtgaaggatttttttaaggagaattataaattattgtttaaggaaattagagagaatatagataaatggaaaaatattttatgtttatggataggaagaattaatattgtgaaaatggttatattgtttaaagtaatttatagatttagtgttatttttattaagttattattgattttttttatagaattagaaaaaattattttatattttatatggaattaataaagagtttatatagttaatataattttaagtaaaaagaacgaagttggaggtattatgttatttgattttaaattatattataaggttgtagtatatgatattaaatatgtttggtattaaaatagatatatagataaatggaatagaagaagggttttagaaataatattatatatttataattatttgatttttgataaatttgataaaaataagtaatggggaaaggattttttatttaataaatggtgttgggaaaattggttagttatatgtagaaaattgaaattggattttttttttatatttgaaataaaaattaatttaagatggattaaagatttaaacgtaagatttaaaattataaaaattttagaagaaaatttaggtaatattatttaggatataggtatgggtaaagattttatgattagaatattaaaagtaatggtaataaaagtttaaattgataaatggtatttaattaaatgaaagagtttttgtatagtaaaagaaattattattagagtgaataggtaatttatagaatgggagaaatattttgtaatttatttatttgataaagggttaatatttaaaatttataaagaatttaaataaatttataagaaaaaaataaatagttttattaaaaagtaggtgaaggatatgaatagatattttttaaaagaagatatttatgtggttaataaatttatgaaaagaagtttattattattggttattagagaaatgtaaattaaaattataatgagatattattttatattagttagaatggtgattattaaaaagttaggaaataatagatgttggagatgatgtggagaaataagaatgtttttataatgttggtgggagtgtaaattagtttaatcgttgtggaagatagtgtggtaattttttaagaatttagaatgagaaatattatttgatttggtaattttattattgggtatatatttagaggattataaattattttattgtaaagatatatgtatatatatgtttattgtagtattgtttataatagtaaagatttggaattaatttaaatgtttattaatgatagattggataaagaaaatatggtatatatatgttatggaatattatgtaggtataaaaaagatgtgtttatgttttttgtagggatatggatgaagttggaaattattatttttagtaaattaatataggaatagaaaattaaatattatatgtttttatttataagtgggaggtgaataatgagaatatatggatatagggaggggaatattatatatcggggtttgttagggtttgggggattaggggagggatagtattaggagaaatatttaatgtagatgatggattgatgggtgtagtaaattattatggtacgtatatatttatgtaataaatttgtacgttttgtatatgtattttagaatatgtataataaaaaaaaaaagaaaaggatttagtgtttttgaattgtatatttaaaaatagagagagaggtgggaggaagggagaagagtattttaggaggaagagattatgtgtaaaaagtattggaagtaggaatgaataagataatttaggaaaaaatagtaagtgtagtttagtttggttagatacgtggtgttttgaggagggaggttgagcgatgaggtcggatagggaggaaggatttcgattgtaaagggttttgaatgttttgttaaagattttggattttttttgggtattaggtatatatgggaggattttgtgtagatgagtgattttgtgttttaggaggatttgttttttagtagattggaaggtgattggaaagggtgagaatggagataggaaatgttatggagattgtaaagtttgcgtaagagatagggagaatttggttgtgaggataaggtagaattaaagatttgggagatgtttttaaggtaattatttttagatttggtgattggatgataagagagagatttgagaggttgataggaaagtgttttaaggttagatggggaatttttataattttggattattgttatttttttttttttaagaagaagagtagtgttagtaggtttttttttttagttttttttttttttttgcgttttggtagttagggttttataaattttatttttagtttggattttgggagaataagtttattttgtttataatttgtagaagattttattcggtattggagttttttttttatagtgagtgaagttaaggttatagttttttgtattttatttttgtggggttttttgagagttggagttgaagttttttttagattaggaattattatatatttaagtggagttttatttgtttttagtttgggaatgtttcgaaagtttttgtaattttagggttttttgatgtggaagttttttatttagattttcgttcgattttttttttttataataggatattattttgttttaaataggttttaggtaaagttatattttttattcggtagggttgaatggtttcgtttaggaattttacggtgtgcgtttggtgcgtgggattttttttgtagaatatatagaggaattcggtatcgttttcgtagaagaagtagattttttcgtcgtgtttttcgtagtaagttttttttagcgggtttaggggtataggggttatgggagtttttgtttgtttttttttttggtagagcgggtagagtaggattttgttcgaggattgggtttttatttgggagagcgcggggaggtagagtcggtagaaggtgtgtttatagggaatggttatcgtattttttagcggtttcgtatagagggtataggtaggtagtttatggattatttttagggacggggttgcgggtattacggtgttttttttagttcgtttatttcggtttttttagtttacgcgagttttttttttttgaaatcgagttatatttatatgaatcgtagagggaaacggttgtaaggttgagagatagagagagagaaagagagagagaggtaagaatgttagtatagggaagttatttggtttcgttttttgtgttttttagaattttggttattatttattagcggagtgggtttaaattttagggcgtttcgaattatttagaattttttagtggcggttaagtaagttagttttttatttttggttttttttggtttttagggtggagaatagagtatattatgaggttatagggggatgggttttttggaatttgtagattatagtggttggggagaattggggagtagaagttttttgttagattgagtaggtgggagttataaatttttggttttgaggcgtgtttatagtattaaagtttaggttggagtgagaggtgtggatttcgggagattttgtcggaagtgtgtgggcgggacgttgtttcgatattgtaggtagggtgtaaggattgtttatcgggtttttttttttgtttttttttttttttttattatatttgtttatggtggttttttttacggttttaaattttttattatttggtataatagttttttttggggttcgggtaatattggattattttatttatttatttatttatttatttatttatttatttttattgtagcggggagaaggtaagaaattataatgtaaatgatttatgttgatatatattagaaaacgattagttagataattagttttaattatatttatttagggtttagtatttttatattattatatttaattttaataattttttaggtaaatattattatttttattttatagagaaagaaatgtaaattgattttttaaatgtaaagtgattttttaaaggttataaagttagaaagtattacgttaaggacgattttagttttttggtttaaagttttacgttttttttatattttatgttaagattaagatttgtagttacggttttttatttatgtatatatttgtggataaaattaggtttttttttatttttttattgggtgattagtttagttttttgtggttgttttttttttattttaattattttattattttttttttttatttaatttttgttttttttgttacgagtgtagtttaggaattagtttgtttaatataggagttattagttatatgtgtttattgagtattgaaatgtggtcggtttgaatggcggtatgttgtatatgtaaaatatatatcggattttttttttttttttttttttttttttttttttttttttttttttttttttttgaaatggagtttcgttttatttttcgggatggagtgtagtagcgcgattttggtttattgtaagttttttttttcgggtttatattatttttttgttttagtttttcgagtagttgggattataggcgtcggttagtacgttaggttaatttttttgtatttttagtagagacggggttttatcgtgttaattaggatggtttagattttttgatttcgtgattcgttcgtttaggttttttaaagtgttgggattataggcgtgagttatcgcgttcggttaatatatcggattttaaaggttttttataaatttaaaaatgtaaaatattttattaatgattttttatatggattatatattgaaatgataatattttggaaatataggattaaataaaataatattattaaaattatttttatttgtttagattatttttatatggttattaggaaattttaaattgtatatgtggtttattttgcgtttatgttgaatagtattgttcggaagatagatttgatagtaaattatttatggttatttatttttttatttgtgtgtttagggtaagttgaataatttggttgggttttagtttttttatttatgaaatggagattttaatagtattgatgttgtagagtagatatagaaataagattatatttttaaattgtttgtattaatgtaagttgtatcgttattgtaaataaattttggttaaattgtttgtattaatgtaagttgtatcgttattgtaaataaattttggtcgttagtagtttttttttttttttttattatagggaatattttagttttttttgaggtttgtagtaggttagttgaggtattattattgaagttgttggtgtagtgtatattttggtataaggattttatttgagtttttatatttttttgtttgttgatgggtaagttttgggttggttgatatttttaatttttttggagatagttggttatatggtagaaaggttggaatggtatttttattttgtgatttagttttttatttgtttttaaaagaatattttttttgatagtggatagttgatatattattattttttttatattgtgagtgtttttggatgggtagaaaggaatggttagtttttggttatggttatttaaggttatttttgaaatgttgtgagttttttttttttttttttttttgttattttttatttttgttgttggtaggagaatagaattttggttgttagagatgtaagtgtgtgacgatatgggtgttggtgtatatttagtatgtgtttgtgtttagttatgtgtatgtgtgggtgtgtgagtgtgtgatttagtttttttttcgtggttaagtagagagagtggttttgaggaagttatagtagtaggattagtatggtttttgttgtttttgtgattagtttggtagatgaagttaattgttttatttgttagggtattttgagggagtcggttattatcgattgcggttataatttttgtcgggtttgttttattcgttattgtgagatattaggtttagatttggaggagttttttatttgtttattttgtaaagaattttttcgttttgggagttttcggtttaattggtagttggttaacgtggtggagaatattgagcgtttttagttggtgtttatattgggtttgggagaggaggatgtttgttaagagtacggagagaagatttattttttttgtgaggatgatgagatgtagttgtgcgtggtgtgtcgggaggttggggagtacgttatttatattatgcgttttttggaggatgtagcggttttttatagggtaggaaaggggaattgggggattttagggtggattggattggattaagagaaatagtagagttgtggattatttaggttattcggaggttaaattttttttttttatttatatgattatttaggtaatagatttaggtatggaaaattgtgtttatgttttatgtttttttgagtgtgttttgtgtttatttgtggttaatagataacgggagtttaataagtatttgttgaatgaatgagtgattaaatatgagtgtgtgtgtttgtgttatggattaggtgtgtttgaagtttgtatttgagggaatgattgtataaatagtgtgtatatgtgttaatgtttgtatgtttagaagtgtgtttggtgtgtttggatgggagtttgagtatgtatatattcgagtgtgtaagtgtaattgagagtttttgtttgtgaataaattcgtgtttatatatatttaggttgggtaaatgtatgtggtatgttattttatttgttattaaatgaatgtgtgttggttttagttgtttatgtattgtgtttatgaattatgttttagtataagtttgtgtgtggatgttttaattagttaattagtagttgatagtgagaattttaatatatttttgaatatatatatttatcgtgtgtgtatttgtttttaattttattttggagtaaataattttgaaaataatttattaattatttttatattatttaagtttttttttttttttggagttatatatagataattgattttagtaataagggagggttgttatttatatatgtttttttgggatgagtcggaaatttagaatgattttagtgcggggtatattaaatttagtatagattttagatattatttattcgaagtaaaatataatagaatgttaaatttgaagaaagatttaagtgggaaaattaagttatagtttttaatggtataggataaagggggaaagttttgatttaaagttttagagataaattaagaggaagaagatttaaagggagtaagttgttagggtggtgaaggttcggggattgttagttaaggaagggattttttttttggggttattttatttttggaggtagagggttagatgattagataaatttgaataaattattttttattttgagtattttatgttttttttttttaggaataaatttataagtgttttaaatgtttaagaaaagagagagaggagatttaagaaatttagttaagagaaaataaaaggatgtaagtttttttggtaagttattattttttttttaggtttttttttttttttagggtttagtgtttttttgaaattgaggtaatatagattatagggttttgaagttattatgagtttaaattttgattttgatattaattttatgattttaagtaattttttaattttagtttatttatttgtaaaatggagagtaaaaattattatgattttattgaattattgtaagtattaaatgagattgtgattgtaaagtagtttagggttgtgtatataatgtgttttttatataagataggaggtagggtgtttttattatttttttttatattttttgtaagttttattttttttagaagttgtagtagatggtgttgagataatattgtgagttttgtttttcgaaatgggatgataagtgaaaaggaaattatgatatagttttagatttatttggggataggggaggaagaggagtagagggagaaggaggaagtaaatttttttttgggtttgttttttgtttttttagatttaggtgtttattaagagataataggtgatttttgagttcgtatatttgaggaagtttttagaggaatagtagagtatttttttagtataattggagagttaggatggggatattttgaggtaacgggatgaatttgatttgttggttgttggggagatttgtcggtttagtgtttttattgaagaattggaggagaagaatgagaggttagtaagggagtttttgacggtgaggtttgaatcggaattttgttttatttgtgttgttttgtgatttttgtatttttgttttgtttaagttatgtttttttgatttatatatttttgtattttagatgggaggtgggttagaggattagaaagttttaattttagtttatgtttttttaagagttttttggttattttttgttttttggtttttattttttcgttttattatttgttaaatagggaagatattttttttaaatattttatagggtttttgtgaggatttaatagtaagatggaagtgaaagtagtattttgaaaaagtattaagtaagttgtaaattattttttataatttaaatgttattaattattagttaggaagtttgttttggtttattttatttttttatattggaggagaggtattggggtttttataaagtattggaaaggtagtatgatttagaatgatgtttttaggattgagaaataggagattttggtatgagatttattttgtttttagtgagtaggggaaggttattttattatttttatttaaaaaataaaggttttgggttttgatttatagagatgggtgagttttaatgttttgtgattttatgtatttggtattttttttttatttagggttagaaatatattttgttttttttagttataagaaaagtgggaggagtttgggtaatataataaaattttatttttataaaaaaaaaaaaaaaaaaaaagaaaattagttaggtatggtgataaatatttgtagttttagttatttaagatgttgaggtaggaggattttttgagtttaggaggttgagtatgtagtgagttatgattacgttattgtattttagtttgggtattagagtgagatttttttttaaataaataaataagtaaataaaaaataaataaaataaaagtagaaaaagaaaggaaagaaaaatggaaaggagaagttggaaattgaatttttggtattttttttttttaggatattagaagtattttaataaggtaagtaatatagttttttttttttttttttttatataaatatatatatatgtattgtatgtttagttattgttatataggtatataatatttttatttaaggatataaatttatatataaatttttatatatttaaatgtttttttaggtatatttatagatgtttaaaaatgggtagtgggatttattttagaggaagtacgtttgtttgtaggaattagcgttattatgttttattagaagatgattagttgagtttggagatattattaaggatgataatttttagatttagttatttttgtgtttttagatgtgaaattagaaagtgtcggaaatcggtggttgtgtcgttagagttgggttagaggattcgggattttttttagtaggttttttcgttgtagagggagatgaagatgtttttgggtaagagaattttaggtttttatagagcgtaggtggttatgaagtttgggtttaggagtggtttttacgttttattgttgaaaggtgtgattttggtaagttttatttttttttgtgttttgatttttttatttgtagatttttataaaatttgtttattaggatattgtgataatgaagaaagagaataaaggtgaatatttttggtgaaaaagttaaattgattttaaaataatttaataaatttgattagtggttattaagtaatatgaaagataatgattaataatatattatttttaataagttaaaaaattttatagtaatatttgtaatatgtgataagtttttgatgatgaatattgttaattaatagttaataatagtatttattttgattttgtggtatttggttcgttttttttttttttttattttttttttgttagtttggtttagagttagacggttttacggggattgtgttttattttttttttcggaatagggagtggtggtagggtgtgggggagggtttggatgagagttaggaatgggatatggttttttgttaattatttttttattaattatgatagaatgaatgatgatattaattttgaaatgatttatttatagttatgttattttagaaggattttttttataattttattttttgtaaatatttttagtgatttgttagtgaaggaaattttattttaattaaaggttgatttttgattttttttaaaattatttttaagtggaataataaataaatgaatttatttttttatttattaagtagatattttttgagtatttattatgttttgggttttgcgggtatagaggtgagtaaggtagttatggtttttgtttgattagggttagggtagtggggtttttattagtagtagtagttgtattgtttaggaaattgttagaaatatagatgtttagttttattttagagtatttgaatttgaaatagatgtgttttaataagagttttagatgattttgatgtaagtttggaattattggtttagaggattttagtttatatttttttttttgttttttttttttttttggttttagtttttttattattaagtgtttgatggttttgtaagattaataaaattttattttggtttattttttttatagaaaaattatgttttgagttggattatgagttaggtaaggagtttatgttaggatgggagagaatgagaagttttcggaaaggagagaaaattttgtaggatttgtattatgattatgttatgattatgataatagttataataaatatttatggatatatatatatattatatatattatatatatatatatgtgtgtgtatataatatatgtgtgtatatataggttgtgtgtgtgtgtgtgttatattgtttgtaaggtttttaggagaaatatgaagaaaggataagtatatatatatattatattcgtggtatgaagtttatattttgatttgcgtatgtcgagtagatagaaagattaatgtagaatgggataaagtttatttgggaatgttttttggataaaggggattttgatttgggtttataattatttttttagaacgtaaggaatttttgtttttttttagatgttattttatagatgatagaaggagggcggtttgtgggtgggaaaaaaatgaatagaatggatttttttaaggttgttattttttaattaattagtttaagattttgggagttacggagttgttggagggggttttttaatttatagatggatttaaatttatggaagttttttaatttatgaatattaaaagtaataaaacgtaaggttttgtagtagtttttggtggtaaaaagtggtttttagattttgatagttttagaattattgaggtagagtgaataatttaggggtgagttagagagtttgttaggagggaagattgtaaatgagttattagtgttttgggaggaaaatagggaggaattatgaagtttggattgaagggagaaatgtcgttgtattttgggatagagatgggaggaggggagaatgtggtgtattagttttaggagatttaagttggtacgtatagttttggaaattaattaatttgcggtgagtagaagagttttttcgaggattatattgaattaaacgagagtttttatattttttgaggtaggttttttaggttttatttgtgtgtaaattatttgggtattttgttaggatgtagattttgagagcgtatatttaataagtttttaggtggttttatattgttggtttacgtaggtattatatatgtttttggtaataataatattaataggaggggtttagggggagtttttatgttttttttggaggtaatagtatgtttgttgatatttgttttttttggttatttttatagtttatatttttttagatttttagattttttattttaagttttttttgttcgaggattattagcgagtttagtttttttataaatggtagaatttattagataatttttagcgttttgatcgggttatttgtgttttggtttatattggtattataggggggagatatacgtgggtggtgagtatagatttggtttatgggggtagttgtatcgtgggcgtggtgagcgaggatgtgtagcggaagggggagtttcggttgcggttagaggagggggtgtgggttgtgaggttggtttggggtttcgtttcggttttgggttttttttttatacggttgattttgaaggagtagtttcggtaggtgagggtgttttttgattatgaggtgggttgggtgatttttattaacgttgttattcgagagtttatttatatttttattgttttttttattaggaaggttatttttttttttgggttttggggtcgagggtttagtttttttttgagtttttgagaaggagtagttatttatttttttttaagtataggatttatattaatttaagtattatgtggatttgatttttggttgaattatttggatgatttggaatagaaatgattgttttagaagatgggatggggtcgggtggtaagggatagaagagaggatttttaatttattgattaagttttttttttaatgtttagtggatggttagggtatttggggatttaggttgttgttagttttgtttattattattcgtgtttggtatagaagtagttgtatagaaagggtattggatttgaagttagaagatttgggtttttgaattagtttgttaattagttgtatgattttaaataaggtattttatttttttttattttgtttttttttaataatgttagagtttatgtaattatattttttagaattatttagtttgtgttaattatgaattaagtagtgtggtggttattggtgatttgaaaatatagagaaaaaaaaaatttgttttatatttgaaagagtttttgggaagatagagaaatataaagaggaaattatagtatagtgtggtgggtgttacgggaagtttaattttagtattatgggagtttaggggaaggggtatagtttagtttggaaggagagggtgagtgggggatggttttttgaaaagggtggtttaaaggatgtttatggttaatagggaaaagaggggaagaagtattttaagaagaggaaatagtagagaattggttggatgatttgtgattttggagtattgggttgtttttattgttattatgggtagatgtgtgttatttttagtcgacgttatttattgtttttttttttttggtgttgttatttttgggtgagattaaggtgtagggtttgggggtaggaggatataaggtatagttataaattataatttagggattatatttaattttagggaaattgtttttttgattagttgattattatttgaggttaagaaatgagatagtgggagtaaatgggttataaatagtttagttgtgggtttagaaattgttaggtaaaagaattttagaaggaggttagggtataagttggatgatttatgaattttagtttaaagaattgagattatcgtaattgagattattgtagtgatatttgagaaatgggatggaagagtgattatgttttatttttttgtttttgttattattgtattttattttgtataattatgttttttattgatagtttttttaatattatttgtttattttgtttagtgtaaattataatgttttgttatttttttattgggttttttgggaggaggggagttatttagggtgtaaatttaaaggtagagggtatagcgtgtttaggtttaagtttagaatttaattgagaagttttgttgtttatttttattttagtaggtagaaaagaggtggagattagaagttagggattagagattgaattgttttttttgggagtgtgtagtattttattaaaatgttgtatatttaaaaaaatatagatatatataagtgtttatataatgataaaatatatttaaagtatttaaatttgtgattttagaaaagtagattttatttttgtttatttttattggttttagttgtgttttttgaaaggattattattttttaaaatgtatgtgtatgaagattttggtttgtagttcgggagttttatatattttgtgttattttattttggtaacgagttaagattatgtaattagtttatttatgtttgatttaagagtttttaattgttatgttgtattgttttatttagagatagatgtttgtatgggttttggcgattattttaatgttggttatatttttataggtgatttggatttagaaatataatttatattttttttttttaaattgttttattttattttttttttaatagttatatgttagtgagaataatttatatgttttatattgagaaataaaattgtttataagtgaaaatatttatgttggtttgttagtatttgttttttttttagggtaattttatttgaagtttatttgttttcggagtatggagttagtataggggaagtggatagattttaaaatttggtaattttaagataaggtagtttaatgaatttttttgttttgttggtcggaagtgggattttgggttttttttttaggaagtgtttaagtttagaggttttagagttttagttatttttttcgattttgaaggattgttgtatatttgtaatatttatagtttatattttattttttaaagtttatatggtagtaattttttttattgtaaagaattgagatttatttaagttagtttaaatgataggtaagtttattataaaagtagaaataaggaaaatgcgattttttattatgagttaggtttcgtgagaagttatgttaggcgtgagcgagttggtggggttattattcgtttttgtaggaagaattagagattttaaaaatgttgataataattatatatatagaatttattttggttaaatattataataaatatttgtatatattaatttatttaatttttataataattttaggaggtaggtgtttattttgtatataagagaattgagatatgtggaggtcgagtagttggttttaaattagttgatagtaagtcgtagagttagtatttgaagttttgtggtttggttttcgagtttgtgtttatgattattatgtagtggtatgttgtatgtttaggatttatcggtaagaagtgggttcgaagtttaaagaagcgtgaagattggatatttttgcggttttttagtagtatgggttatggatatttgttttaatatatcgtggttgtatatgtatttttgattttttttgtgtttgttttttttgttaattaatgatatatttattatggattttttttgaattttcgagaggatttgatggttttagttaattattattgtttttttttgataaggttttttttgataggtgattttatagatttgtttggttaattatttgttgtttagatttttatttttggtttgattatttgtggtgacgttagaagggattaaggggggtttggaaggtatttttagtataattgaatttttttttgaggagagattttgggggttgttagtttttttttatttttagtataagtttttttggtgatattaattttatttgggatgtagaaattgttagttgttatttttaggggtgttttttttttggttaatgttttgtttttagatttgggattttatgtttttttgagatttgtagttttttgttaaataattatattttttttttgaatatttgtattaggttttttttttttttttttttttttagtttttaattttttgttttagttttttttgtgtaaacgatttagattggtttttattaaatattatttttttttttatttttgatttagaaattttattatgttttggtgttatttatttagtttgttgatttttcgttttttttatttttgaatattttagtttaattaggttggtttttttatatttttataaaggtatcgtggtttttttttatttttatgtttttatttatgtggttattgtgatttagaatgtttttattttttttttttatttgtttaatttttattttttttataaaatttattttgatttttttaggttcgttgttttttttttttgaatttttagggtatttagtttttgtgatatttaatttagtgtagttatacgttttttttttattttgtagttgtttagttatagttttatagttaaattataaatttttggatggtgaagtggaatttatttaaaatttttttattattttatattttattttaaaaggggaagtggtttttttaaaaaaagatgaaatgaaaaaggatgagtttatgttttttttagggatatggttgaagttggaaattattatttttagtaaattatcgtaaggatagaaaattaaatatcgtatgtttttatttattggtgggaattgaataatgagattatttggatatagggtggggaatattatatattagggtttgttttggggtggggggaggggggagggatagtattaggagaaatatttaatgtaaatgataagttaatgggtgtagtatattaatatggtatatgtatatatatgtaataaatttgtatattgtgtatatgtattttagaatttaaagtataatttaaaaaaaataataataaagttagaatatattaaaaaaaaaaaaaagataaaatgaatatatttgaatgtttacgttttagatattttagtagatatttagtatgtatttaattttgataataattttaggttataggtattataatttttattttagaggggggagtatagaggtttagagaggttaagtaatttgtttaaggttatagaggtattaggtgttaggatcgagatttaaatttaagtttgattttgtagtttttattttttgtattattacgtggtttgttttataattgtggttatgttttattttttatattttttagtatggtattgattattttggtaaaggtttaataaatattgattataaggtaattgatggttttttttaattagaggattgagaagagtttttttttatgtttttttattagtttatttatatatatatttaaaattttattggatattagttatgagttagatattgttttagatatgaggatatagatagaatatgatttttgtttatttaaagaagtgaggtttatataaaaatgattaatatataattgtatttattatttattattttataaaaattattataaatttattgttttataataatatatggttaggcgcggtggtttatatttgtaattttagtattttgggaggttaaggtgggttgattatttgaggttagaagtttaaggttagtttggttaatatggttaaattttgtttttattaaaaatataaaaaattagtcgggtgtggtggcgggcgtttataatttttagttattagggaggttgaggtaggagaattgtttgaatttaggagatagaggttatagtgagtcgatattatattatcgtattttagtttgggtaatagagtgagattttattttaaaaacgaaaatagaaaataaaaaaatatatatatatttattgttatattgtttttgtgggtgggaaattttggtatagttttattgggtttttagtttaggtatttataagattataattaaggtgttggttggattaggtttttattcggtttagttggggaagaatttgtttttaagtttattcgggttgttggtagaatttaggtttttgtagttataagattgagggtttttgtttgttgttggttggaagttgtttttggtttttaggaggggttttaaaagggtgggttagtaaggaggagttttatataatgtaatatagttgttagagtgatattttattatttttgttttattttatttattagaagtaagttatagattttatttatatttaaggggaggggattaaataagggtatgaattttaagaggtgaggattacgaagggaggttgtttttgagtttgttttttataataataataaataagtgttaggtgagtggtatagataataagtattgtaggaatttagttgggttttatatgtgaggtggtgttattgttgatgagttcgggttatttagaggtttggaggattttatttgaatgagattgtgagagatgggtattattattagtttataggtaaaatggagattttataaatgtttttggagattatgggtttcgatttttatagtggtagttttaagtatgagtttgttttggaaggaggttggttatcgtttaagagttagagggttaggtattaggtgatgattgtggatatgaagaaatggtgatatgtttaggagttggtaggttcgaagatgtattgggtagatttagtgggggtttggataggttggaggaaggagagagaggaggttgaggtgagtttgaagtgaggtgttttagggatgaataggttagagtttttgagggggttgaagaagtaatttattgatttttttttttaattggggataaataatttttaatttttgtggagtatttttagaaataaagaaattttttatagattaatatgtatttatatattttattggtttttttattggttatgtagtattaagatataaaagttaacggagtagtgggtttttttgatttttgtgtatgtttgtgttgtgtgggtttatatgtatatgtgggaaagaagaagggatagttcgtatttgtttagtaagttattagtattttaggagagagaaaaagtgagaattataattggtttttaggtttttattatttttaaattttttttttaatttatttttggaggttattttggggtgttattttgagaattgggggaatatagtaatattttttttttgtgtttattttgttgtagtagtattttgtagtttggaataagttatatttattataagttattatatattatataggttttttttttttatattttttagaagggtgatgtagatgggttgttttttatcggggagaattttagtttttggggaaggttttagggtatgtatttttagtgtgttggtgtttaattttttggtcgttttttttagattaatgattaggtttttgagttgtgttattgttttggagatgttaaggattttggtcgtttttgttggtatgtgttttagttggtttagttattgttgagggagggtatttagttgttttttggtttggtgttggtttttcggtttagtttttagtttgtggttttcgtggtttatttgaaattataggaaaggggttttttaagatttagtgttaggtggtttttttttggttttttatagtttttgaatgtttgagtaggaatgttgattttttagtttttttgtttttatggtgttgtttttgtgtgttataggtatagtagaagtagttttgatttttataaaggtagggatattttatttttttattttattttttgaatatttatagatgttatgtgattaagaggaatagaaaggtagattgttagagatagaaatggaggtttatggcggtcgggtacggtggtttatatttgtaattttagtattttgggaggttaaggcgggcggattacgaggttaggagatcgagattaatttggttaatatggtgaaattttatttttattaaaatatagaaaaaattagttgggcgtggtggtaagtgtttgtagttttagtattcgggaggttgaggtaggagaatggcgtgaattcgggaggcggagtttgtagtgagcggagttcgtgttattgtattttagtttgggcgatagagtaaggttttattttaaaaaaaaaataaaataaaataaaaagaaatagaggtttatggtttgtgtagtaatttttagttgacgagatattggttttttttgatttttattgtgatttaggtagagtaggattggtttttatttaatatgtaagttatataaagattagagggtttaatttgcgtaggttatttaattagtaaattttgacgttaaggttaatattcgggtttttagtttttacgattatttgtttatattaggttgttttagggatagatagatgtttagaatagttaagtaagggtttttgagaatattttagggagttttttttaggaattcgaaaaatttatttgtagagtttgtagtttttttttttgttgagttttgagtcgttgaagttttgtaatgttttttttgagttttttgtttcggcgattgagtcgtttttaaagagatagatatatttgtttgttagattgggagtgaggggggtatttattgggaggagttaatggaatacggtagggggtttgattttagaatgtaattaatgtaaaattttgtttaaaaagaaatgtttttagagtattatggttggagtaagggatttgagagtttatttattggataatgatggggggaaatagtaatgggtaatttttttatagttttagaagtatagaaaaaataatagatagtaatagaattatttttatttgattttagggtgtttttttttaatatataaaagttatatgatagttttttagtattttttattattttatagtaatatatggagttagtttggagggaattgttttaaagaggaaatggtaattttttgttatttttgttgtttggtttttattgggatgagtgataagatagagttttttattaggtgtaaatttatagtttaggtaggtagtgtttttttttttaattttaaattagtatttggatgtgtcgttgtgtttttgaagttatggagttaaagaatgatttgagtttttaaaaaaattttgtttttaggtttttgatgatttataagagaagtaaaaataataataaatgttttaaatggttgtttatggttcggggggtagttggagggtgaatgataaaatagaaaataaaacgagaagagatttgtgaattaaagattaggatgtgttattagttgaaaagtgtgtgttttattaaattttttttattttagatttttttttttttaattttttttgaggagattttggagatgtataggtagaagttaggggatggtgaagataattgaaagttttttttagtttgagaattttttggtgaaattaaggttaaaggattgtgtgtgtgaggggttagtaagggtatttggtgaatagaaagttgtagtaagtagagaagatagtgatgttattataaagttattaaaaacgtgttacgttattgggtgttttttgtaggtattttttagtagagacgaaataaaaaagttataggagtgggaagtaataaatgggtattatggatgtcgtttatgagtttcgttgaagaaggtggtaggttggtgtggaattgtttgtgcgagtataagagtttatgttttgaaaagtataaatagtttttatcgtttgtatttatttatttgttgtttttatagttaagttgtttggtgttgttgtttttatttttttattgtcgttattttttagttagtcgttttgttttttattatttttttaaagtttttttttttaaagttatttgagatttttagttatgaaattcgtaggtgtttttttgtattttttttttattttattttttttagatttgtgttttttgttattgtttttttgtttttttatttttttttgtaaaaaggagttttgaagttggttttttaatttttttttattttagattatgtttttagtttttttttttggagtttttagattttagaattttaaaattaaatttttttttttagtaatttattttatgtttttaagtgagagttaagtgttgtttattgttttgttggtagtttaaaattaatatggtagaattaaatatgttgtttagttttttaagtttttttgtagtttattttttttgatttttatgtttttgatattgggattgttattttgtttgttatttagtttgaaatttgttatattttatttttgttgatgttagttttttttttaaaatggttttttagtaataaagataagtttaaatttttttatttagtatttaaggtgttttaggatttagttttaattgatattgttcgggattttttttttgtttattgaattttttttattagtatataatattgttttttgttttttaaatatattcgtgtagttatatttttttatggttttttatttttttttgttaggagtgttttatttttttgtttgttaaagttaggtttattaaggtttagtttaaaaagttatagttttattatttggtagtttaaaatttaataaagttaattatagatattgtgtaaatgaaaaaaagaaggtaaagataatagtaataaagataaaggtatagaatgattgaagataatattgttatattgtttataatatttaaaatgagtaaggtaaagttttttgtttttaaaaagtatttttttattaatttttgtataaaggtatttaatgggtgtatataatataaataagatatttattagaattgaaaagttaaattttatatatttttatttattaaaatattttttagagaaaaaaagataagttgaaatttagaaaatagtcgaagatttgttttgtttaaatgaatattttaaaattttgttatttaggttaaattatattaaatttttaaaatttgataaaaaagggtattaaatttgtttttaaataatttgttaatataatgtataaaagaaaagtggttaatagataaaaagtatttatttttgatattgaaaaaaaaaaaaaaaaagaaaaattaatagtttttaaaatgtatgttttttatagaattgtgtttaaaaatatgaattaaaaataatattatttatataattatgatttagaaaatgttagaaaatttttaaaaatgtatggtaaatatatgagtttagtaaagaattttatttgaatttataagtaaaaattgttaaaaaaaatagtgttgtaaaatatatagttatttttaatagagttagggtatatgaggtttaagtaaagataatttaatatttgatttagatatatagtggaaagtcgttagtgatgtattttggtattggttgagaagattaattaaatttttaaaagttatgatttttagtaattaataaatttaatgtaataattattaaaattttatggaatgatttatgaaatttagaaatattgtaaaaaagtatttattttaaaagatagtaaaaatattaggtaataaaattattaaatggtaaaaatgttgttagatttaaaaataaattataaagtaatatgttgttaaaattatataatagaaagaataattaatggattagagtaaaaaaaaaatagtttattatgagaatttaattgatgttaagcgagaaataatacgtaaatgtggaaaggatttattgttatataaatattttgggaataattggatattagaataaagaaaaattaacgtggagttattttttatataatatattatatgaaattttaagtaagttaggaattaataaatttttaaaaataaaatagagtagtatatttatattaaataaatttttgtgtatttaagatatggagattatattataaaaaagaatagagttaatttaaatgtaaatttttaaaaagttgtttaaaaatataattaagaagaaataatagaataaaaaaatgtaggttaaataaatataattaatggagtttattatttaaaagataaattattttgatgtaattatgtagaatttatgttttgattttaggggaaaatgtagatagcgagtttttatggataaaagttttattattattagtatttataattaagtaaagtaaaataacgtatattattgttatatatttattaaattagtaaaatatattaaagtgattgatattgatattgattggttagtgaggaaataggtatataaataagaatttgtagattttataaatttttcggtttttttagagtatagttagggattatatgatttttttaaaagaataaaatttataatatttaattataaagtttaatttaaataaatagagatatggtgaaaaaattagtaaaaaaaaattttttttaattttaaaattacgttgttaatatttatgagtatatataaggtttattattataattatttttttagaaatatatttaatttttttattttttttttttgtgttattttttagataattttttatttatggtaaaatgtattattatttttttgtttgttgtttgtttttaggtagttttttgaaatatgttaaatattttagattttaaattggtgttatatattgtttgttaattttatatagttttttttgtaagcgtttttttatattgtattatattattttgtttttttttaaattttttatatttattttgattttatttatattgttgatgttttttttttaaatattatgagaaaataaaaattagaataaaatttggatttttaaaattgtaaaattatgtaggtttgtagatatttttttttgttttttgttattattatggaagaagtgtgtttttttttaatttagtttttatgtttttgttattattttattgaagtgttagtattgtttaatgtaatttattataattttttaaaatattttttttttttagtagttggggtattattttttttgttttttttttgtttttttggtaatttattttgttttttttgttgggtttttttttgtttatatttaaatgacggttttttttagaattttattttaaaatttttttttttgtttagttttttttgaggtaattatattagtttttttggttttttggttgtttgtttttttgtttgagatagggttttgttttgtttttttggttgtagtgtagtggtataattatagtttattttagttttatttttttgggtttaagtaatttttttattttaattttttaagtagttgggattataggcgtgagttattgtatttagttttaaattgttacgtttttttttttaaattttgttaattttattttgttgttgttgttgttgttttagagatagtattttattgtgttgtttaagttggttttgaatttttgggtttaagcgatttttttattttggttttttaaagtgttgggattataggtgtgagttatcgtgttcgttttttttggatttaaatattgtttttgtttggatggatttttgttttaggttttaggaataagattttggagatttaaatttgtgatttagttgcgtatgtaagattttattttgatgtgttttaatttggatttaatttgttttaaatgaaatttttggtgttgtatttaaatttgttttattaagttattattttttatattatttatttagttttttaaattagaaatttatgaagttatttttgattttttttttttttttaatttattttttaaaatatatatattttaagttttggggtatatggatagaatatgtaggtttgttatataggtatatacgtgttatggtggtttgttgtatttattaaatcgttatttacgttaggtattttttttaatgttattttttttttattttttatttttttataggttttggtgtgtgatatttttttttttgtgtttacgtgtttttattgtttaatttttatttacgagtgagaatatgtggtgtttggttttttgattttgtgttagtttgttgagaatgatggtttttatttttatttacgtttttgtaaaggacgtgaatttatttgtttttatggttgtatagtattttatggtgtatatgtgttatattttttttatttagtttatcgttgatgggtatttgggttggttttaagtttttgttattgtgaattatgttataataaatatacgtgtgtatgtgtttttatagtagaatgatttataattttttgggtatatatttagtaatgggattgttgggttaaatggtatttttggttttagatttttgaggaattattatattgttttttataatggttgaattaatttatatttttattaatagtgtaaaagcgtttttatttttttatttcgtttttagaatttgttgtttattgattttttaatgattgttattttaattggtagagatggtattttattgtggttttgatttgtatttttttaaagattagtgatgatgagtatttttttatatgtttgttggttgtataaatgtttttttttgagaagcgtttgtttatattttttgtttattttttgatggggttgttttttttttataaagaatttatttttaattttttagtaagttttgtcgatttaaattttaatgataaattttttaaatataataagattttttaggtgtgggtatttgtatgtattttttattttttgtttttgtaggttgattttttttttgttagtttttagttttaaggttattttttttatgaggtttttattgattaaatggatatgggttatttattattgtttattttagatttttgtttattttttttttaattaataaaaagttatagtttttttgggaggttagcgtagatggattatgaggttaggagtttaagattagtttggttaagatggtgaaattttgtttttattaaaaatataaaaattagttaggtttggtggtgggtgtttgtaattttagttattcgggaggttgaggtaaagaattgtttgaatttgggagacggaggttgtagtgagtcgagattatgttattgttttttagtttgggtgatagaatgagattttattttaaaaaaaaaaaaaaaaaaaagaaaaaaaagttatagttttttgattatttatttgtgttttttttattatattgtaaatttttggtagaaggaatggtatttgtttttattgatttttagtatatgttgtagttttttatatatagtaggaatttattaagtttttatttaatgaataagtgttatcgttatttatttgttttagtttttttgttattatttaaagatagatttgaaataagaattatgaattatttttgtattttttataatgtttagtatgatatttaatataaaggatagatttgaaaaaattatttagtgaggaaataaatttttttattttatgttgttttatcggtaggtgaggaatttttttttatttttttgtggatattgtatttggagggaatgatgttagaattaaatagaattttgtttttggtttttttaattatttttttatttttttgtagttatttttaatttggattttttatttttttattttgtattataatatgttttttaaaagttaagtattttaaagttattttagttttggaagtttagtttttattattggatagaaggatgttatgtgaaaatattgttaattgtttagttaaatattaattggattagggttaggggaaaggttgataaaaataattttaaagttaattggtaaaataaagatatataaatatttgtacgaattttgaaaaataagagtattgtgaggattttattaaaatatttgatattaaaatatatggtaaggataaaatttttaaaatattttggtttataggtaagtatagatagaatagaatagtataaagaattaaggtagtatgtaagaaaatatgtatatatggtatattatgatattggtatttaaattaatggggaaattatatgaattatttaataaatggtgataggataaattgattataatttggaaaaattaaagttagatttttattttatgtttttattaaaatatattttggatattttaggttttttaatatatatgttgaaggatatttattagaacgttttgtgtaattttaaaataaaataatagtttggaaatgatttaatgtttgttaatttatggtatatttatagaatttaatattatatagtttttgaaaataatttagaagatttatatatgttgatgagaaaatgtttaagttatatttttagataataaaaatgagttatagaaaaaaatatagagagaattttttgagggtgtgtgtgtgtgtgtgtgtgtgtgtgtaagagtgtatttataagtatatatattttttggaaggatgtataaaaattaaataatggttatttttgaggattatgaatggagggagaaaggaagataagtttttagttttgattttatattttttagtgttttttgaatttattatttatagtatgtaatttttgtgatagaaaatttaatagaataagataaaataattgttatagtaaagaaaggaaaaggaaagataagataaatgtagaaggaagaaaaagagagaaaaaattatgtagtaatttttaggttttaatatatttgtaggataattattagtgtatataaaatttgattatatttttagttaagtttttagtattattaattaggagtttatatagttttagttttgaaagggttttgtattagttagtttaattattttattttatagatgagtagattgggattttaatattatattgataatatttttttttagatagatttatattaatgtatggaaatattagttttaaaatatatatagaaaagtaagataagggtttaaaataggatgaagtagaagaaataaagagagatgtttattgttgagttattttgaggtgttaggtatgatgaatatgtaggatgtagtattttagcgaggtggaggtagggtttggttgcggtgatttaggtttattttgtagtggttgagggtatttttaatggttagtttatgatgagatatgtgtttaggggatattaggtattttatatatagaagaagtttgttttttttatagaatttgtatatttttttttggtggttggggtagatatagtttgtttttagtatttttttagaatagggttttcggtagagggggtagtagaagattttagaggttgaggttttttttatatgttgtgttaggtatattcgatagaagagatgttcgtagttggtgtttacggttttttttaggtttttttggtagatggggtagatattttttttttggttgtttttttgtaaagggattatggtttcgtttttattttgttagttttttgtttgtagggtttttttttttattggttttcggaaggtttgttgtttttaatagttttagataagaaggtttagtcggaaggaggtagttttggagtagtttggggataggatatagtttttaagtttaggtaattgtttatttttttttaagggtgtcgtgatatagattatataaattataattttgtacgagttttagaaatagtttattagttttgatatggattttgcggtttttttgtgtttgttaaatttgaaattattttttatatatttagaggaagtaagtgatttaataattaattttgttttttttttgatagtttttagtgaatatttgtacgggttttaaattaaaagggtaaggtgttattgttatggttaaaagttagattattataaatttataatttgagttttttttgatttgttattagtagagagagtttggtaggagtttggattgtttttttttatattgttatatcgggtggtttattgttgtttattattattattaataattatagtagtatttttattagttggttatttttttaattaatattttttttagggttatatagattttatattgaaagaatgagaaagaaaataggatatagaatagattagagatttgtataatgtttgaagttattttgtttttttttgttaaattattattaaagatgatttaaagaaagaagtttttcgttatttgttattttttttagatattgaggatttatttttatttttttatgttgtattttttgtttagttttatttttgaaaagtttttttagtattttattttaattttttttgttataattttagattattttttttggttttagatttggagagatggttagtagatgagtggtttttatattatgttaattatatgtgtttatatgttagtaaattttagggcggggggtggaaagatttatgtttttttagaaatattgaattattaggaaaattatttagggtagttggaaggtgagatggattttggtgtagggcgtggtttgtttgtttaaggggaggaggaaggttttgggtttttgacgtcgatatgataggaaatgagatttaattaagaatggatattttagaattttagtttatggaattttaggatttaggtgttatagaataatggtatttatttaagatgttggaatattaaatgtttattttattgtttaagttttttttagttaggttagttttggtattgagtttgagggagtttttaaggggtgttattaataagggttgttatttgaaatttttaagggtttaagacgtttgttgaaaattttattttagagtttttttttttaattttattttgttattgtttgttgtgggttgtgtgattttgtgagatatatatataattagttttggtatagagtttttaaaatttttgaatagatgatttttaatttatgatggggttacgttttagtgaatttattgaagttagaaatattgtaaggtgaaagtgtatttaatattttagtaaatttattataaagttaaaaattttaagttgaattattttaatttttgatgtattttaatttattatatggttatgttttgatgagtgtattttttattatttataataagttttttttaattatattagggtttatgttaatgaggtgatttttggaggaagaatgggggttggttggtagaagaattatgtgattagagggtgggattttttttttttttttttttttttttttttttttttttgagatagagttttatttttgttgtttaagttggagtgtaacggtattattttagtttattgtaatttttgttttttaggttttagcgaattttttgttttagtttttcgagtagttgggattataggtgtatattattatgtttagttaatattttgtatttttagtagagacggggttttattatgttggttaggttggtttcgaatttttgattttaggttatttgtttgttttggttttttaaaatgttgggattataggcgtgaattattacgtttggttggttggaatttttagttttatttttgatttttggggaggggagaggagtttagggattgagttaattattaatagttagtgatttgattaattatatttaaataatggaatttttgtaagattttgaataaagaggtttggagagattttaggttggtgagtgtatttatatgttgggagggtggtatattttatattttatcggggatagaagtttttgtgtttaggatttttttagaatttgttttttatttggttgtgaaattattatgattttggtgattttaaagattatgtatatgattatttaatattaaggttttttagtttttgttttgtttatatttaatgatttttgtttttgttatttattttagtggttatttttttgattttgttaggatttagattttattatttgaaattataaatgtaggtattgtatttatttatagttttttttttaaggtattttcgataatgtttgttttttaatttttaatttttgatttttttataatttacgtttttgtcgtattttatgaaatagtataagaaataaaaatgtggatagattaagtaatttgtttaaggttatagtggtgtaaatatagagttgggatttagatttgggtgttttttattttagtttatgggttttattattataaaatgttatttttttatatatatttttttttgtttttagaaaggatttagtaaaagtttgataaatggatggattaatggatagatggaaagatagattgataattagatgtatggatagatagatgaagaaatagtattttgtattaatttatagtattgattatatagtaatttttattagttatttaggtattttttttgatttttttattggtttattgagtaatttgaaggtagaaatttattgtatttaattagtagtagtttgagaatgttttaaatgtagaaattataaaaggaaagaaagataaatttagttatattaaaaaagatttgtatgggggaaaaaaaatcgtaagtgtaatgttaagagataaatgatgaaatattattggaagaagaaaaatatttataattgttattaaaattaaagggttaattattttttatatatagtttttgtaaataagaatttattaattattaagaagaaaattgggtagaggtattttagtagatattttatagaaaaagaaatattaaatgtttttaaagtatattaaaagataattttaattttatgaagaaaatataaattaaaataatattgatatattattttttttattagattgatagaaatttaaatatttggtaatatagtgttggtaagtgtgtgaggaaattggtatttttatatattgttgatgggaatgttaattagtattttttttttagaggagtaggaatttgagaattttttttaagattataaatgtatattttttttgagttagtaattttgatgttagaaattttatatatatatttatgtatatgtgaaataatatatgtatatatttattgtattaatgttttagaaatatttgttttaaattttagaaaaaaaataaatgtttattaacggaagttaagttaaataaattagttatatttatataatagaatattgtgtagttattagtagggggtggggtgtggaagggaatttttgttattggaataatttttaatataaattgatatattaaaaaaaaaaaagtttggttaggtatggtggtttacgtttgtaattttaatattttgggaggtcgagataggtggattacgaggttaggagatcgagattattttggttaatatggtgaaattttgttttattagtcgggtatggtggcgggtgtttgtagttttagttattcgggaggttgaagtaggagaatggcgtgaattcgggaggtggagtttgtagtgagtcgagattgcgttattgtattttagtttggatgatagagttagattttgtttcgaaaaaaaaaaaaaaaagtttaatggtgtttattttatattagataggaataaagtaattttttgtttattttagtttggtttttggtttatgtttatgtttggtttatgttttggatatatagattattgattttaaaaaataaaaataaattaaatttaaaagtaaggtatagaatagtgtgtataatatgttattatttgtataaatcggggaagaataaatatttttatttgttttttatgtaaagaatatttttggaagaatatattaatgaattagtaaaatttgtttttggagagagaaattagatgtgtggaaattaggggtaagagggagatttttttttgtgtttttaaaattttgagttagtaaatgtgttatttatttaaataattatttaaattttaaaatgtttaagaagaggatggttagaatgaaaggaattttggattagttaaagaatttggattatggttttaattgtggagatttgtagttttatgtttaggggtagttataattttagttttttttataagaaagtggataaaatgttatagttggaaatggatgtgttttataaattataaattaatgcgtaattgttagggtttttatttttttgagttagtttattcggtatagttttttgaatatattaggtgtttagtaattgttttaaaggagtgattttatttaattttttatgttttaaaaatattggagttaagagttaggtgatttttgtttttttttttttttttatgatttttaattgtttttgttttgatattttttagtagggaagatttaatttttattttttttatatagttgttttaaattttttatattagtggaagtttagtttaagttttagttttttgaatgaaatttttttaataagttagtttttattttgatgaatgggggttgagatttagtttagaggttgtttgttaagttgtgggttttggtttagggtagtaatggttttaagaaagtgaattgatttattttaatttttataaaggtgttagaggggtttgtaggttttatatggattttttttttttaaattatcgttttatttattattatttgatttttgttaatttttttggttttggtttatatttagttttatgagggataggattatgtttttttgtttttttatatttttttatgtttattttagggttgggtattttaaattattttttaagggtttttaattaagttttaaatttaaattttagcggtatttttttagtttatatttaaattgatgatttaaattttagattattagtagttttttttttaaaatttttttttttattggtttttgggtttttttttatttatttgattatttataaaaggagatttattttattttagtgtagcgaggtggagttacgtggattttataggcggagtgttcggatttagatttttattttatcgatgtatagttgttagtattatgtagattttgtaatttttttgaggttcgatgttagtttggtattattatttttattgagtttaaatttttgtgtatttttaagtgttttattattattttaagtttaatgtattttcgaattatttttgtttggattatttgttattttttttagaataggtaatgaatagggttatttagttgttttcggtagttgttttttgatggatagtaggtggcgttgttttttaagataggatattatttcgttttattttcggaaggtggagtattgttgttaagattttagggtattggtaatcgttttttaaacggtggtttaaaaattgatagtataattttttagggtaagaaatatttggttgtggaaagttagtcgtgaaatatgtagattgaagatggaaggaaagagaagggaaggggagtataaaattgtgtaagaggaagaggggtggtttaggagagagatagagtttgtagggttgtagaaggtaggtaattaataaggaaagtttattagtgagaaatgttttgggtagaaatagtgaaggaatgtttaagaacggaaatgtttaatattgaaatttaagttgtttgttttgagattgtgttttttgttgaaatttgttttttagattagtatttaatattttttatttttagatttttaggaattaagtagttaatttgttatgtatagtgatttgaataagaggaaatttagagaaattttaggaaagttgttatgttttatgtttgatgaggtagtttttagaaaaatagggttggggaggagtaggggtttaagattttagatttaggaggtatgggggatttagtagagtttttgggagttgttggtgaaagaaatgagttattggtaggaatttttgaattttatttagtcgcgtggaggaaataatttttaatatagtatgattttatttagagtgtaaaaaggttaattggtagaagtagatagtattaatataatggtggttattaaagtttgggcgtggtgggtatggggatgggttggttaaaggatataaagttttagttattttaaggaggaatattttaagagatttgttgtattttttggtgatttgttagtaatggtatattgtgtttttgaaaattgttgagagagtagattttaagtgtttttattataaaatacgaaaattaaataaataaaattaaaatagtttgaaatgtattgaggttattaggtatttattaggttgttaaggaatttttattttaagttttataaaatagttgattttgagaagtatagttagatggattagtgtggatattatatatggcgaggttgtagaaagtaatgaatttatttttagtggaatgcgtatgaggggttggtttatagtaaatatttaattggatatatttattttaataaaaggatagggttatataattagttatttttttataataggggaatttatgagtttttaattttaaattgaggtatagggaagaattaaaaagggtaagtaaatgtagagagtgatgttcggtgatatagatagtacgttagtttgaagtgggattttagcggagagattttagggataagtttgttgtagtcgtgaagtgtgtagaggaagttttgttattaagtttattttttgtattggttttttttaagattttggaattttaagtaatgtgtttaatatggttatgttaagtgttttgtaaaatttgtaaaagtaatatattttaattacggttaggattattgtttttttttacgttaatttttttttgttatagttttttttgtattaggtagtatgtgggggttttagttaaggggaaattaagttgggattatattgtttgagattattaggatatgtggtttataagtatttttatgtatagttaagttattgttattcgttttagtgtagaagtggtttataggaattattatttattgagataatttatttgatattagagattaaagtgaaaggttagagatttgttataataagaatgtgtgttgtgatatgaggtattagaagtttgtggatagtgaagttaataaatttttttaatttttagatgtagaaaattataagcgtattatttagttttattaaagtttagttaaaatggaagtttttttttttaggaatatatttattaaatatgtatatataattatatatatattatgaaataaaatgattttttgtatatttgtatatgaaattaatagaagttattttgatattagaaaaggaattggaagaagaaaaaaagtttggttttagttaaaattagtaatttattgaagggaagggatatattttaaatagaatagatgtttagattgtttgataattatttgatgaagaattaattatataaatatattaaaatttaaaaaatttgttgttttggtataaaatattgatatttataaatagttttatattatatttttataataaggatttaacgaaaaataggttaatgatttttagtaatttaaaagagtatttaagattagttattgtttaagaaaatttgaaatgttttgaaattttaggtttatataggaaattttttatagaggtttttttaaaattaatagtattaaaaatttgtatattattattaataacgattgtgaaatggatattaatttttttaaatttttaataaaaattttttttgtttaattatgttagacgaaatattaaattatttatttttatttaggaaaatatattataaaagtgttgtcgaatgaagagggaattaaaaaatataaatgggaaaatataggggtggtttaagtagttattagaattttggggggattttttgatgtttgtgatatgttagtttttaaatatttattatttgttgttattgtttttttttattgtaagttatatttgtttttatttttaattttgttaaattttgtatttttttttttttttttttttttttttttttttaatttttttattttgagacggagtgttgttttgtcgttagatttgagtgtagtggtaacgattttggtttattgttttattgtaattttcgtttttttggtttaagagatttttttggtttagtcgttcgagtagttgggattataggtatatgttattatgtttagttaattttttgtatttttagtggagacgaggttttattatgttggttaggatggtttcgattttttgatttcgtgatttatttatttcggttatttaaagtatcgggattataggcgtgagttatcgtgttcggttgtatttttttttttgaaaagatataatattgtgtaagtttttaagttttataaatttgggttattttttcgttttaggagagtttttcggtaatgggagtggtttagataggttttttagatagggtcggtttttaataggagttttaaggggagttgaatcggaaaataagtttgttagtagcgttggttttacgtgttagggtttagtggatagagaaggaataggtgagaagtagagttttcgtttagtttttagcggtttttttgggagttttgttcgtgatcgtttcgaggggttgcggtttcggggttcgggtcgttttgagtttttatttttgcggcggttttagaattttaggggtaaggtttgcgttttgtcgtttgtagaagatcgtcgttaacggatatttgggttttttggtgtttttagttttatttttttttagttttttttgtaattaatttgatcgaatgtgtgaattgggattttttttaaaagtttattttaattgaaattgggatagtgtaattaggatttcgttttttcgtttttattttaatcggttgttttttaaatatagtttttttaaaacgtcgttaggtattcgggcgtgaaggcgcgcgttcggcgtttttgggcgtttatttagtggttcgcgcgttaatttttttaacgttttttaattatcgttcgagttgttttatttttcgttcggttattgatgtagaggttgttaggtttttttgcgtacgaaatttattatagtatttgggttagtagttagtgtcgggttgttttttttttattttaaggcggtttttttgagtttttatatcgtttttttcggatttttttttattttgaggattttaggttgtcggttttttatttgggttttgcgtatttcgggttttttatagagtagtcgtttttattttacggatagggaaatagaggattagagtttcgaaagtcgtacgttttaaagtttttgagagtggtttttaaatgttagtgttgtggttttggaaagatttattttattttttgtaataaaggtagttttagagaattggttttcgagtttttttcgtgtagatttttaattttttaagatattatagattaatttagttggtaaaagttttaagaatagtatattttaaattaatggaataaaaaagttttgtttagttgagattgtagaatttttagttggtttatagatttttaaggtagtatttggtatttttgtttgttgtttggtttttttttcggtttttagagttgattgtagttttaatttttttgttatattttggtttgtaaattgagattttataggggtttttatatcgtagggtaattttttatgtcgttgttatattgaagttagaatttttaaagttggagtatttaggtgtttgtattttagaggttttagtttgaatatatgtataagtagggttttgtttttgagtttagtgaagaggattgttgtgattttagtttttttgaaatattagatgtgtaaaatgtaagatttttttttagttttgattggaggtgatgtggtaatgtgtgtacgtaagaaaagtttatgtagattttatatagattttattattatagataagagaatttttttgaaagttaaggtttagagaagagtaaattattgaaaaattaaggtttgtattagaagggtttttgtttttattaatggattgagtaatttagattaagtttttatttgaagataattaaaaatgttcggtaaaatatttttaagtattttatttaaatatttaaaggttagtgaggaattgttgggttaaaatttgggaaaggaaaggaatatggaggtgagtttgtaattggggtcgtttttgttttgggagtatttgttgaagagagtttaagaatttaagttgtatttttggtagtttttaaaggtttaaagggagtagaaatggtgttttagtttagagaattttaagtaattattgaatttgtttaaagtgattttaaattgttagtgttaaaaataattattttgggaagaagataatagtattttaggttttaaatgtatttagtaaataagtaaaaataattaagttttagagaggcgagattgttataagaaaagtagaaataggttaggtgtagtggtttatgtttgttatattagtattttgggaggttgaggttggggaattatttgagtttaagagtttaagattagtttgtataatatggtgaaatttcgtttttataaaaaatgtaaaagttagttgggtgtggtggtgtatatttgtagttttagttattagggtggttgaagtggatggacggtttgcgtttgggaagtagaggttgtaaagagttgagattatgttattgtattttagtttgggtcgtagagttagattttgttttaaaaagaaaagaaaagaaaaaaaaataaaaataaaaatagataatagaattagatttatggggtttttagattttggggttattgggtatagattatataataatgtatatgttatttttaaaaggataaaagttatgtgtgaaatatttggtagagagttagaaattatagtaagtgacgtagtagattttttttggggaaaaggaaatttagattgagatagtgatgggtattagaattataaagttatggaaatttaagtatggtggttgtgttggttaatttgtgagtttagaaagaattaaatatgagcggttatgtgattatagagagaaatggagagaatagttttttattttttagttgagttttttgttattataaaattatataattaaaaatagatgattttaattatgtaatttaaagggttatatatatatttggtttaaaaaataatatattaaaaggtatagattaagtaggattgtgattattttgtttttttttatttattttatttattattattttcgtttttggtttatcggtatatatttttattagttttttgcgtatttttttaatgtttttttatgtaaatagaagttaaatataattatatatattggtattttttttttttattaagtaaagttttgtatattaaatattgttttgttatttaataatgttgtttaaagattgttgttattggaatatagagagtttgtataaaatggttgtttagtatggtaattgaaaaattagttgttttgtgttaggtattatggtaagtgttgaggatgttaagatgaaaaattatggttatgggtaagagtttttattattttttaaatttggaaaattaaatttaaaattttttttattttttattttttttttttttattttttaaatttggaaaatttttttagaatttggttttgggagggattagattgttatttttgggtatcgtattttattgtttttcgtttttttgtaatgtggatttattggtatggttggtttgcgttagttggttttgtgtattggagtagttggatgttagtttagaagtttttgatagtttgggtttagtagttttgtgtttattttgggttagagtatatagttgttttgtaggagagaagggagtattagttttttattttatagatttagtagaggtttgattttagatgtgagttgattttgagataggtttagtttgatttagggattaattttaaggttttgttaggtttttgtggagttaataaatggagtaggggattatgggggtaaagggtaggttagataaacggaaggagaggtatttttatttggaataaaagttgtttgtttttaaagttttcgtaaatggtttaatattttaaaagttttttattttttaaaaagtaatgtttaaaaatattcgggttaaaaatattgattaggatattttatataaattaaatagtggaagatttgaataaatgttttgtataattaaaatagagttttttttttgaagagaattttggatttttatttatatttgatatttgggttattgttttttgattaaaggtgtaatttttatttataggaaagttataatttaagattaaaaaaggagtttttttacgatgttttaataatattttatttttgttttttcgttttttattatttatttattttttaggaatatttttttttttttttttttttttttttggtgaggagttttattttgttattaggttggagtgtagtggtgtaatttcggtttattgtaatttttgttttttaggtttaagtgatttttttgttttagtttttcgagtaattgggattataggtatgcgttattatatttagttaatttttgtattttagtagagataaggttttattatgttggttaggttggttttgaattttttgattttaggtgatttattcgttttggttttttaaagtgttgggattataggtataagttattatatttggtttttaggaatattttatattaaatataggagttgataggtaggtttattttttatttttatttatatttattttttttttttattttttgattagttggaaaaatttggaaagatggaaaagagattattttagtataggggaaggaagattatttgttatattgttaggaaaaatatacgatgtttagttaaatttgaattttagatgtataataagtagttttttagtatgttttaaatattgtattatttattgtttatttgacgtttatatttaattgggtgttttgtatttttatttgttaaatttgataattttgtttggtaaatttgggttatagggtattaggttaattggaaaagatagttaaggaatgaaagataagtttagatgaaagggaagaggttaatggaggacgagttggattttattttgtagaaaatggggaataattgaaggtgttagtttttttttttaagtaatatttattgtgggatttttttaattgtaaaagtaaatatgttaattgtgttgtatttggaaagtatagaaaagtataaaagaatataattatttataattttattaattagtaataataattattggtattttattgttaattgtttgtaagttgatgttagtttttatttttttaagtttattttgatagttttattgaaaattggaattatatcgattgttttttatattttttttttgttttatttttttttttataatatttattttttttttagaattttaatgtgaaaaaaaaaatttttttttaatgtatgatttatttggttagttgatttattgtttggtttttagtgggtggggtttttgtatattttatttattgtaataaaagtgtttagaattatgtttgttatatagtaataagtatttattgtaatgaataaataagttatttttttggttttttttttttgattatatatgtttttgattatttttttatgtaattataatagatttgttgtttaataggtatagaaagttagtaagttgaaatttggttgtagtagagaaagaggtttaatcgtagggtcgttaaatgaggatatggaagggaattttaaatttatttttttaaataatttggagttagagattttaaagattttggagttggttaaagtgattggttgaagagtgtagggtgaagttatgggataaggagatgaagaagttgtattattaagttgagaaaatagtttttttgtggaggttttaaattagttgttattagttgttttattaaaatttaggatttgtttaagtaattttttaaaaaaatttttttaattaataattttttttgtagagatgggattttgttttgttgtttaggttggtttcgaatttttggttttaagtaatttttttgttttggttgatttttatgttagaaattttatttagagtaataatggggatatgattggttagtgtttagtgttatatgatttttggttttaaggaagtgagttaaagtgtagtttgattaaggtttaattataattatatttttgtttagaattattgttaattttgtgaggatggttttatttagggaaaatttttagatatgaaattattgggttaaacggttttaggtgtattttaaaataattttggtgtatattgtttatatatagtttagaggggttaaattggtttatattgtagttgtaggattgtggagtgtttgtattgaagtttgtaatagagagaagaggagatgagtattgttttatttagtaggaggtgtaagggttgggagattttttgcgaagagttggaaatttagaattggggttgtggggatggaaggtgggttttgcggtgatatgggagtttatttgtgtatttttttgttaggattttcgtaataaagtattataggttgggtggttttagtaatagtaatttatttttttaaagttttggaggttgaaagtttaagattaaggttgttgtttgtgaggtcgttttttttggtttatagatggtcgtttatttagtgagtttttataaggtttttttttatgtggagtatttttggtgtttttttgtgtgtttaaatttcgtttttttatgaagacgttagttagattagataaaggttcgttttgatgggtttattttatttttgaggattaaattttgattttttttttttttttgtttaaatttttatttaaggggtttggggagttatgttttataaatcgtaaagttttattagaggggttttatttaattttaatgtggtttattttttaaattggttttggtataatattatataataaataaggaaagaaattaaaatattttaattttaaatgtatttttttgttatattttgaaattgttttgtaaagttgttttttgtgggggaaaaatttatattttatagagaattttttttttttttttttttaggtttaggagataattaagagtttggtattttttttgagtttaataaaaaatatttataatttattttttttgaagtttgttatttgaaggttttttttgtatattaagaattttgtgtcgggtgcggtggtttacgtttgtaattttagtattttgggaggtcgaggtagatagattatttgaggtcgggagtttgagattagtttgattaatatggagaaattttatttttattaaaaatataaaaaattagttaggcgaggtggtgtatgttttaatgttagttatttgggaggttgaggtaggagaatggttggaatttgggaggcggaggttgtagtgagtcgagattatgttattgtattgtagtttgggtgatagagtgagattttgttttaaaaaaaaaaaaaaaaaaaaggaattttttttttttttttttatagttttttattttaatttagatattttttttttattgattttaggtttttagataaatttaattaattgttaattagaaaatgtttaaatttatttataatttggaagttttttattttgagttattttgtttttttgaatttaatttatgtatattttaaatgtatttgattgaagtattatgttttttaaaaatgtatgtatgaaattaggttgtgttttaattattttaggtatatgtttttaggattttttgagggttgtgttatgggttatggttatttatatttggtttaaaatatatttttttgaatattttatagagtttgattttttgtcgataatttaattaatttttaaaggttttatttttaaatatagttatattttgaggtttttggagttagggttttattatataagtttggagtagtgggtgagagggatataatttagttcgcggaaatttgtatagaagtgttgagattatgggagagatagatatttattataaattttttcgtatttggaaggtagtattttgtatttttgagttttttagggttaattagattttttttatgttttttgaaatgagattttaaaattgtttgttatttaagtgatttttttttaaggtagtttagtttgcggttatttttattaaaatgcgttttttagagtgagttattaagagttttgtgttaggttttggatacggtatttttgtggtataagaatattatatagtttgatgtgttttgatgggggtatttagatttttaaatttaagtatatttttatttttttttgttattttttttttaattatttttttttgatgttatttattgtagaagtagtataattatagtaaataattgggtagcgcggtttagttaagttgatatataaaattaattattttatcggttaatttaataatttaaataatttggataattgagttaagtgaaggttaggtttttttagttttttttttttgtttttgtttttaagttggagtcgcggtgttaggagattgtagttttttttggtagagggagaggagtgagattattatgaggtttttttatttgtataggtatagtagtttttaaattatttttggatttatgtttttatgttttaatgggtttttttaaggaagaaagggagttttatattttgttggggtttttaattttatgattgattttttggttgagtaatttagtttaatgttatattgattgttatatataaattgaattttgttgttttatttattttgatggtttttttatttttttttttttttgtttgtatgtatatatttttatagaaaattttaaatttatttttaatgggatgatatatatgtaaatagaaagtaaatattttaattattttggtattttaaatagaatttttttatggttaagtgttgtgatttatgtttgtaattttagtattttgggaggttaaggcgggttgattattggaggttaggagtttaatattagtttgattaatatggtgaaattttgtttttattaaaaatataaaaattagttaggtatggtggtatagttttgtaattttagttatttgggaggttgaggtaggagaatcgtttgaatttgggaggcggaggttgtagtgagttgagattgtattattgtattttagtttgggtaattaaagtaaaattttgtttcgaaaagaaaagaaaagaaaaagaaaaagaaaaagaaagaaagaaagaaagaaaggaaggaagaaaggaaggaaggaaggaaggaaggaaggaaggaggaaagaaagagagaaagaaagaaagaaagaaaaaaagaaagaaaggaagaaaattttgtttttattattttttgtttttaatttttatttttaattaaataaaatttagtttttttgttgggagattggttatagggtatttttgtgtaagttgttttttgattttatttcgattttatcgtttttgatttattttgaagtttaaaaatttttttgaaattttgtgtgtattttattttttttataatattttttttagttatcgtttaaatgtattttaagttatttgttttgaggtttttgaaaaagatagtgtttatttatattgaaattagttatatatgaagagttttatttttttatatttttattagttttggatatttttgaaaaattttgttaatttgatgagtataaagtttattttatttttgtatttgtatcgtattatttgtatttttttgagtagtaggaaaggagttgaatttttttttaattttagaatttattttagaatttttttgaatttttatttttatttttatttattgtttatttttaatattttttttattttaattaaaatattttattttggaaaaatttaatatagaaaataatagaaaattatataataagtattttataattataatttagaattaataaatataaatattttgttatgtttgttttagatttttaaaaattaaatattatagatttaattttttaaattttaattttaaaaaaatttgagattttttttgtttatttagttttttttttagttttatttttttttcgtttttttttttttttttttcggaagtaaatattgttataaatttagtatgtatttttttaggttttgtgtttaaatttttattatatatatggaaattgtaaattatatgaagtgttgtgtgtttttaagtgtatataaattattatatatttattattgttttgagatttagttatatgattatatatagattattggttttttattagaggttttgttttttagggatatttggttatgtttggagatatttttgtttgttataattgggggataggagtgttattggaatttagtggtagaggttagggatgttggtaaatattttatagtgtatagggttattatatattaaagaattatttagtttaaaatgttaatagtgttattattgaaaaattttgatataggatttatttatttatttatttatttttttgagacggagttttattttgtcgtttaggttggagggtagtggcgcgatttcggtttattggaagtttcgttttttaggttttcgttatttttttgttttagtttttcgagtagttgggattataggcgtcggttattatgtttggttaattttttgtatttttagtggagatagggttttatcgggttagttaggatggttttgattttttgatttcgtgattcgttcgttttagttttttaaagtgttgggattataggcgggagttatcgtatttagttaatattaatattgttatatgtatttttgagtgtatatgtgtaaggttttttttagagaggtagaattatatagggtgtaagaaggttttagaggttatttgggtttaagtttttattttattatttatttattgaatgatttttggggtaaattgtttaattttttttgattttcgttgatttgtttttaaaatgggaataataatatttttttatataaatgagttaatacgtaaaatgtttgggattgtgtttggtatatggtaagtatttaagaaatgttagtttttatttattggtagtagtatttttattattattattattattatagaattttgaaatgaaagtatatcgtttaaattttattaaatatttttaaattattgtaatttatatttttattagtagggtataggagtatttatttttttatgtttttggttatatttgttattttagatttaaatttaagatataaattgatatttttttttattttaattggtattttttttttttttttttttttttttttttttttttttttttttttttttttttaaggaaacgttttgttttgttatttaagttggagtgtagtagggtggttaaagtgtagtggtatgattacggtttattgtagtttcgatttcgtaggtttatgtaatttttttgtattagttttttaagaagttgggattataggtgcgtgttattatgtttagttaatttttgtattttttgtagagatagggttttattatgttgtttaggttgtttttgaatttttatgtttaagaaatttgtttgttttggttttataaagtgttggaattataggaatgagttaatgagttgagcgtgtatttttaagattattgtttttaagtatttattggttaattggttttattgttttgtaaatgtttattttattttttgtttattttttgatttattatttaatgttgtaaaatataatgtaaaaagtattaaaaaagaaaaaaatttaatgtatttatataattaaaaatttataaaatgtaatatgttatataaagaaaagttttttttttatttttgttttttggttagttagtttttttttttagagataattattgttagttattaaatttttatttttttagaaagaatttatttggatatttaagaaaataagtatatttttttttatttaaatggtagtatagtatatgtatttttttgtattatttgtttttttttttttttatataataatatattttggttatattttttatatgtaaataaggaagtttttgatttttttttatttttattttgttataaagttgggttataatttatttaaatatttttatattgatgtatatttagattgttttttaatattttgttaatgtaaatattattataaagtttaaaataaatttatatgtgtaagtatatttgtagattaaatttttagaggtggaatttttgggataaagggaatgagtatttgtagttttgaaatatattatattatttttttttatagatattttattaatttatataggttcggaaatgtgaattttgaggtaggggaagtttttgtagttggaatcgtgatgtagggaggtttatgtaattttgtggggtcgtttagtttgataattgagttgtttttagtttttattggtttttgataaggtgttttattttattagttttggtaggttttttttagatttgtgtattcgttgttgtatggttttgtgtttgtttttttgtgtgtgatagttgttttatgtgtatgaggttttgtattattttttgttttatggttaatttttataaattttatgttttagaattggtttggaagttttttggaattaatataatattaattattttaagattttagtttttgtaaattggaggtatttggttttagattattgagtttattaagagtttaaaatatttatttaagggttgggtatagtggtttacgtttgtaattttagtattttgggaggttgaggtaggtgggttatttgaggttaggagtttaagattagtttggttaatatggtgaaatttcgtttttattaaaaatataaaaaattagttggatgtggtggtaggtgtttgtaattttagttatttgggaggttgaggtaggagaattatttgaatcggggatttagaggttgtagtgaatcgagattacgttattgtattttagtttgggtaataatagtgaaattttgttttaaaaaaaaaaaaaagaaagaagaaagaaaaaaaatatatgtatatatatatttttatttagtttagtggatggatgatttaggataataataataattttgagagagtaaagtatttttgaaatattgtagatttttattttttatgtttaaatttttttttttatgaagttattagtatttgtttggtgatagttgtttgaaattttttagtggtgtttatatgagtatttttattttttttgttgggttgtttagttttattgaaatattaatgtttttttaaaatatttgtttattatttttaaagattattatttgtttttattaatgttgaaataagaaagaataaagaagatttaatgtggaataggaaatttggaattaagtttgagatttgttatttattagttggatgagttggaataattagtagtgtttttaaattaggggttattaatgtgtgagtttttattaggagtatcgatttttttagagaatttgtttaagatgttaattattaggttttattaaggatttgttgaaagagaaagtttttattggagtttagtaaatttgaattttaataagttttttaagtgattttgaagaatattgagttttttttttgagaaaggataaagataattttttataggtgagaattaaatgaggtaatataagtaaaataaatttataaattagagttataatgttaaatgtttttaagggttaaggagacgtgaggtagtagagcggtggggaatatagttattttttttaaaggtatttatattattattattttttaaattattatgttagttaaataaaatttgttaaaagttaaattttgtttttaggggttagtagtttaggagtataagtaaaataatttatagatgttagattgttttaatttaattttaaaataaataaaaagaaaggtttggaggtataatatttttgaaagtttttggtttatagtagttgttataaggggagttatataatttatagtttaaattggatatttttgaaagtgaaaggaggtgttattaataattatattaggataaagtgaaatttaggatggttttaggtaaagtagagtgtatgattattttggttattattataataattatttataagttttgtttgatttaagattaagattagataaaaattaatggtgtattttttgttggggatagacggttgataatggagagtgaggaggtgagggtggaagttatattaagagaaggggtagggaggaagtatttttttttttaagataagaggtaaggagggaaggttaggatatgaatgtatagaagggaatgtatgtaatattggttgatatatttttagttataataaaagttatagaaggtaagttagggattagagaagtattaagaaggaagaagaagaatatatagatagaattggtaaagtaaagaatgggtacggagatattagtatattggagatatatagagaaaaaattaatagaggatagattattataggtgttgtggggaggtagaagattattaggggtaagagtaaagtgtaaaaataaagaataattttttagaaaggaagttttttgtttattttattgagttagagagtggttggttgattttgtgattggaaattttttaaggtaggtgatgataatttttatatttttataaaattttgtgaggagttaaagtatttgaggtagagaattgttttttttttattttttagatgttttattaaggtttgaattttgtatataagatgtttaaagtattgtagtgaattggttgtgattttttagtaggtattattatttatttttttattttttatttagagttgattgggaaattttttataagtggtgtttggtgtttcggttattttgattttagttaattattatataaatatatttttagtttaaagtttaggataatttattttattttataagtagtttattatatatttaaagtatttatttgtttttaagaggtagtaaggtaggattgtttatttgtttttttttttttataatattttttagattttaaattttacgtttttttattatttattttttttttttttttttttttttttttttttgtttttttaattaattggtagaatttttgatttttattttttttgatttttttttttttttttagaaatagtatttatagtggatttcggggtttttatagatttggtatagttttttatagttttgaaatagttttgttgttttgttatggttagtgggtagtttgtgaataaattgtaagaggaagtgatttgttttatttgtttggatattttgtagaaatttgttattattgattgtgggtataatttttgttttaaatgtattatttagattggggaaatattatgtggattttttaaatgttttttttgtaaaattttcgtaaggaagaacgtaattaggtttaattcgttgttgcggaatttggtggagaaaatttaagttttataagtttttgaggtgtagtttaaaaggaaagaggttatatgttcgaggtattaggagatgttttattatttttgcgaggatgatgggaagtttttttgttttgtgtgtcgtgaatttaaggattataaattttataatgttagtttgatcgaagaagttgtttagaattattaggtaggtatttgaggttttttttttgtttttttattagtttaggagtttagtgaggttttggaaattgttatttttttattgagggtttgtattttattgtttttattttttgggtttgagtgggtagttcgtagttaggtatagtgggtttaaagagttgagtttggggaacggttgattttttaaattaaggtgtaatggagaatggaaaggatgtgaaaatttgatttagaaggtttgggtttaagtttagttttgtgagtttattgtataatttgtaaggaattattttatttttttgagttttaggtattttattttttaaatggtaaaaataaaataatttttttaaagttgttggtaggatagatgaagggaagtttgtagttttttgataattttaaagtattatttatagttttagttagttataaataattatgttttggttatttaggttatttaggttttagatttttttttttttagtaattttttttttcgttagtttgagaaaggcgagtttttaataattatataaggatttatttggagagtgttattagtttttttaagagattaggaggattttatgaggttagaaatttttaggtatagtttgtttaaacggtttttttttcgtaggggtagatttaagagtagatttaagttttgtagtaaaaggagaaggagatagtataagtgaaggtataaggtgtatatagggtcgatgtttttacggtaagaaaaattttattttacgatttttggaagtagaaatatttttgttaaagtttttggaattttttattatattgattttttagaaaaagatttagtgagttatgtttttttttttgcgttttagtatttgatcggttaggcggtattatttttcgcgtcggtttcgttattatagcgggttgattgtttagtttttatcggtagataaggtggggtacggaaaattcgcgttggttttagaatcgtaagtataggtttttaaggtcgagttgcgtttttaacggattttttagttagaaaatgaagatattggtcgggcgcggtggtttacgttagtaattatagtattttgggaggttgaggatcgtttgagtttaggagtttgagattagtttgggtaatatagcgagattttttttttaattaaaaaaaaaaagaaagaaaattagtcgggcgtggtagtatacgtttgtagttttagttattagagaggttgggaggtgaaagtattgtttgagtttgggaggatgaggttgtagtgagtcgtgatcgtgtattgtattttagtttgagtgatagagtgagagattgttttaaaaaaaaaaaaaaaaaaaaaaaaaaaaaagatagaaggaaaatgaagatattgtgattttatttatttatttttttgtgtgcgtgaaaggaataaaatttatatgaaagattataaattgaaaagttttttggaattgtattagatagttttttgaaggtaagtggtaaattataaattaataatttcgtttaaagttgagtacgtagtaggtgtttttagaagtttgttttttttttttttttttttttttaggtttgttttggtatattgttttggttgggaattttatataaatttaataaaattaatggttgaataaagtgggttagaaggattttcgaggttatttttttattttttgtttgtttttgttttttaggattaggtagaatatgagaagtaaaggatttttatagaatttgaatttttgtattaagttttagaggaggagaagaattttttgttattacggatttattggttgggttatgagggaacggaagtagggaaatattatgttgtttttattgagttatagttgaacgattttaagaagtttattgattttttgaagattaagtagaatatgttatttaggtagttgttggaggtgagttttttgggggtagaattgtagagaggtagtagtttatttttagttttaggttagagtatggattattggtagaatatttgagattgttttaattattttatttttagtttagtgttgtttaatagtaatatgtgagtcgtatgtattagaatgaaaatgtgagttatatatgtaatttataaatataattttggttatatgtgtgatttagaaatgtagttttagttatatatggaattataaatttttttagttagttatattaaaatgataaaagtgaaattaattttaataaaatattttaatttaatatatttgaaatattatttttttagtttgtaatgaatattttaaaagtattaatgagatattttatattttgggtttttggtggttttttttttttttttttttttatattgagtttttgaaattgtgtgtatattttttattttggtatattttaatttagatgttaaattgttaattgttaaagtaaaatatagttttattaaattaataaagttgtgtttaatggaaaaagtattttattttttttttatttattttattttattttttgagatggaattttgttttgttgtttaggttggagtatagtggcgcgattttggcgtattataattttcgttttttaggtttaagttttaagtagttgggattataggtttttattattacgtttagttaatttttgtatttttagtagatacggggttttattatgttggttaggatggtttcgaatttttgattttaagtgatttgtttattttagttttttaaagtgttgggattataggcgtgaattatcgtgtttggtttttatttttaatttaaatttgaattagtaaaaatgaaattaaaaatttagttttttgttatattagttataatttttaatgtttagtagttatatgtggttggtggttattatattggatagtgtaagtttagttggtgtttaaaataagttgagatgatttttttttaagttatttatttttttataggtttaaaaatttatttatttattttaagaaagattatgtaaagttattttagttttttttttgttttggttagtagggtttttttgtttagttttagagttaaatttattttttaaattttattttttttttttttatttagttttttttgaggttaaaatatttttttgtttattggtagagtagtgttttttggagaagtttttcgtggtggggagaggggaggaggatggggtaagagagatttggaggggtttttattttttttgttttgttttatatttagtaggttttgtattttttttttggtttttgggaattagttaagtgttgaggttgtgttgttttttttttttttttaggatattaaagtcgttttgtgtaggtatgatgggttattttaaatgtattttgtttattgatttatttatatataatttttagcgtatatttaaatgtagttaatattttttttttagaaatatttatttatttttaattttgtatttatatatttaggttgtagtcggggaatgtttatgttaattatattagtacgtggttggttgttaaagaaattagttgtttttttagtttttttttttttttagtatagattttattattttttgaatgtttttttgtttaattgaatagtttttgggttttttattttgtttttttgattttgttttttttttttttttttgtttttattttttatttttatttttatatttttttatgttttattttatttttgttttatatttttagttttgattttttgatttttagtttattattttttaatcgttaggtttttttttttttttttttttttttgagatggagttttgtttttgttgtttaggttggagtgtagtggtgtaattttagtttattgtaatttttgttttttaggtttaagtgatttttttgttttagttttttaagtagttgagattataggcgtttgttattaagtttggttaatttttatatttttagtagagatcgggttttattatgttggttaggttagttttgaatttttgattttaggtgatttattcgttttagttttttaaagtgttgggattataggtgtgagttatcgtttttagttttatttttaggtttttatttttttattttttaattttatattttagatttttttttttttatattttattttttgattttattaattagtttaattatatttttttagaagtgaagagttttagttttttaatttaatttttgtttttttggaattggagaaaaaatttagtgaagtaaaattaagatatgattttattatagggagtttgaaaaaatttaaaggtaaggaagaggttgtattttttttatttatttatttttaggagattttttttttgtttattttattgaaatggaattgtgatttatatatgttaataatttttgggtttttttagtgttaggtttttggttgagtattttttacgtattagtatgtttttttttaggtattttttatattttgttttcgtgatatgttatttatttgtttttttggtttttgcgagagttatagagggtttggatttattttttatgtggatatttggtttagagtagtggttgttgggaagttggtgatgagttgtttggtggattagagatggttttaggtagggattgttatttttgatttttttttttttggtgtatattggtgtttttttttgtttatagaagaagagaaaataaatttaaaattagtgatattttggggagaaattttttttagttttatagggaaatagaaattagtagaatagtagtggatgatttgggttttagatgttcggttagatattttttataaatttttttgtgtttgtaattaggaagaagggttagtatttgtaaggattttttttaatgtgaagattgtgttggtttaaggtgggtataaagatagttagatggaattttttgaaattattatttggagttttatatttattttttttattttaatttttagttttttatatataaatatttttttttgggattacggtaaaggaggattagggtaatgttttaagatttttatttatttagtcgggaatttttattcggtagatataaataggaaagtatgttttgttttatttttaattttgttgtttgagttttttttttgtttattaattgttttgttttgtttagttttttttattttattgggtatgattttagtcgatttagtaattttatttatttgtttatttatttatttatttttgacggagttttgtttttattgtttaggatagagtgtagtggcgtaatttcggtttattgtaattttcgttttttggttttaagcgatttttttgttttagttttttaagtcgttggtgttataggcgtatattattatgtttagttagttttttgtatttttagtagagacggggttttattaggttggttaagttggtttcgaattgttgatttgtgatttattcgttttagttttttaaagtgttgggattataggcgtgagttattacgtttagttcgatttagtatttttttaggttttttaggttaagaatagtttggttttagtttggaattttaataaaggagtttagttttttttattttattaggtttggagttggggagattggtgtgttttattttgtatttttttttttttttttttttttatatatataaatttatatatatatagttttttaatttttatttggttttatttttttttttttttttttttttatttttattttatttttattttaaagaagaaggtataatggttatttggttttattaaagtttaggaaatataggaggtggtagggagtttatttatattataggtttaatttttatagtttttattatgagggttggttttttttgttcggggtgattgggtttggaatacgtacgtggagaagggtgtggttgggttttgaagttgttaaaggtttttgtaggtgaagtgtttttaggtagtgttttttatgttttaggtttgtagattttttttaagagggttttcgcgttttcgttgagtagtttttatgattgggttggtggtttttagggaagttgtttacgtttgttttattatttagttttaggttgttttgtgttgttttggggttgtaagatattgggggaagggtgttggggttagaagtagttttttatttaggggttttattttatagttttttatttagtttagtatttttataggaaatttaggttaggaatgggttattgtttttagtttttgggtttattttttatttgtaaaaggagttttttttggtaggggtgaattgggagatgaaggtattcggtttttttttgtaggagttttgttttcgtttttttttttaagtttttttttatgggaaagagggtaggattgttatttaggttttaggagagtggggtttttttttattttatttggtttttgggtggttagttttatagtaggttttttgaagttaaagggtgaagttttaaggtattttttgttttgagtatttatttttgttaggtagtgagaaaggggttagttttgtattgtttaatttagtagttgttagttatatgtgttgataggtatttgaaatgtagttagtttaaatttaaatatgttatatgtgaagaattattaattttataagattgagtgtaaaaagagattgtaaaagatagtaataatttttataatatatgttgaaataatattttgagaatattgagttaaataaaatatataattaaagttaattttattagtttttttttattttttaaatgtgattattagaaaatttaaaaatatataagtggtttatatttatgatttagattatatttattatttatattggatagtgttgggttaggtagttattataggaaagtagaaagggtattttttaagggttgtatatttttttggtttaataagaatatgagagttaaatgtagtttttattttttttaggtattttaaattagtgttttgttgtgtgatagtgagttttttgtttaatttttttggatttttattattttattttattttttattttttagattaattttaggttgataggaaaaaagatgaaaatagattttttaaaagtatgaataaaaatgatatgaagagttgtaagtgagaaatgatggttggttgtttttgttatttggggaaagtgagaaaaggggaagaattgtgtttttatgattatatgaaggttagatataagtgaatgtcgattttttagttaattgagagaataggtatatggttgttttattattttaaatttaggtaatttataaaatagttattaattttaaattttgaagtatttagaagtaatagaaaattgtaaatgtatttttttatttttagagatagggaggaaaaagtgggataagaaggaggtagttttatttttgtagtatttgttgtttttatagggtattaggtttcgaggtaaatttttttgggtgtgaggttagtatagtttaggggatggagatttattgtaataatagtttgtgttaaagttattagatatggttttgttatttaagataataatagtagaagtattattttttaaaggattattatgtgcgtatttaatattttaaaattttataattattttttaagataggtgttattatttgtaatttatagtgaggtttatgtagttttcgggaggggaggtaagttatttaggttatatgattattaagtgaaagagagagaattagaatttttttttttaaagttagaaattatagaatgtattttaaagttagagagtaggatttagggattttattttattagtatttttttataaaaggagttatcggtgtttagaaaggttatttttgttatgttttatgatttttgttttgttaaatgtttagtattttaggttttagaaagttttataagttagtagagaattatatttttgttgttattgagataatttgaaaggtttttatatttttttttgggtggggaatgggttttattgagaattattgattgttttgattgatgatggtagggtgtttgtttttgtttttaatttgtagtttttggttattaagattaaataggttttttttttttaatttttagggggtttgttatagaaaaataattataaaatgaataaaattttagagttcgggttattttttgtaggtaagagttttgtttttgaatattaagggatttttaagtttataggtggttaaaatgttgtatttatttaattttattaaatggaataaatgaataaatgaatgaatttatttattttatttttttagtttttttttaaattatatttttgttaggaaatagagggcgtttcgatttgtttaggtgtatttttttgagttttatttttattttttttgttgtatgtagagtttagttgtgttgtttggtaatggaggattgttgtcgaggtgttttcgttgatttttttttttttttttttttttcgtaaaggcggtagaattatatcggggttattaaattattattttttagttttattttattttttgtttcgggtttcgtttgttgggaaagttatttttttagtatgttttttggttttttatgatgagatttttggttaaggagcgagtttttaggatacgaagatatttgacgttgcgttgttcgaggagttttatgcggtattgagtgagtggttgatagcgattcgggtttggttttgtaaggtttttttaagttaagttagtttagagaatacggggagcggtggtgttttacggatttcggagtatagagtggcgttgagtgagtggttgagatcgattacggtttttgatttagtggaattgggtcgaaggagtggagaatgggagggttcgggttattgagagtggagatgggggcgggggtggtggtgaagagagttggagaaggaatggacgagtttttgagtaaaaggaggggaagagataatttttagttattcgttttacgtttgattttttattattttggttgtggtgtcgtttagtggaaaaaggaagtttttgtagtagttttcgtattttttaagtagttgtttatcgaaggtattagtttagttaggagtgaaatttagagacgagtaacgttagtttgggttatagtttattaaattttatgagttcgattattttcgtttttttttatatttttacgtttttttttttttttaattttttatattagtaagggaaattaattaatgagatttgataaattagtagatagaatgaggtttttattttgaaatatttagtagattggaattattacgtaagtttttgtagggggtggatggagatatttttaattttaataaattgcgattgaacgtggaattttagtaaaagtgtatgtgtgtgtggcgggggatgattatttttttttttgtattttaatatttttatttatttttgtgtttgaggaattttattttagaaaattattggtttttagaaagtttgagttttgatattttttatattagatttaatttttgttttagatatgggaattaggggttacgggaaatggataaggaagagatggttttattttcgggtgttgaaatgattttattattattattaatgaagaatttttttttgcgtttatagaataatatattgtgaaatttagggattaattttgaggaggaggaggcggggtcgggtttaagatttttttggggattataaaggttgtgattgggaagagaaagtttttttggcggtatcgagcggggcgggtggtgggacgggggtattagaggaaggtagggggtttggataatttgattcggggttggttatttttttttttttatttttatacggtttttgtgatattggacgtagtttcggtttattcggattttatttttttttaggatgagatagtgacgttgaatttcgtattttagggcggttcgtagaagcggggtaattttcgacgtttttataggtttcgttgagtgttgggttcgttgggtttttgtttcggtcgcggcgtttgggaggcggagttttaagggttcgggggcggggtttgcgtgttgggtttggttttggagttggtttttaggcggggttttttggaggtggagtttttgatcggtttcgtggagttgtatagtagcggtttttagtgttaggcgtttatcgagagcggttttcgcgaggatttttcggtttgttcgaataaagtgggcgttcgcgtggattattagggcggagaggtagttttttacgacgttatttcgaggatttatatttatattttttatgtttttttttcggggtagattttttttttttagtttttgtttttcggtattcggattattttgggtcgttagagttgttttttgtttttttttgtattttttttttattcgtttttcgttttagtttgggatgtgttgtagttggaagggttgaagttaggtttttagtagttttatgggaaggttatatttttcgggtttttttttgatttagttttgatttttttgattttgttttaaatattttttttattttagtttttttttttttataatatgtttgggtcgaaaagaaaggtttaaatatattaaaaggttatatataaggttgtttattgtagtatagttggtaataggataagattggaaacgaacgtttattaataggtggttgaaaaagttgttacgtgtaagtatttagttgtatttcggttaagatagatataggggagtggattattgattttagtttgttcgtttgtttttttttttattttattttttgtagttttcgtggatttgtatagggttttgatttatttgaattttattttgaaaatcgatatacgtaaaatttttttagttttttataatatttagaaattaaaattaattttacgattagatgtattttttttttaaatttatattattattattcgtaataaaagttttgattatttttagtgttgttatgtgagggattgaagttaaatttagagaaggattgttttagttttttgagtgagtttaaaaaaagtaaaagggcgaggaggttggaaacgtagagacgaaatgatttttggatagtaaaatttattatttgcgttagtttgggatgattatgggtttttttttttttttttttttaggtcggttggggattgggtaggcggatgggattaggcgtttttaggttttttttgttttttcgtttcggtagggagagggcggtgttgtaggaggcgtggggagtcgttcgttagtttacgttgttgttcgtcgcgtggttgcgtagcgggagggcgggtttaggtgtcggggcgggagtgagttaacgttcggagtacggattttaggggcgtttagttagttttggttaggtttttttatttagtttttttagtcgttcgcgaggcgtcgtcgattatataaatagtttttatttttttgcggaggggataataaagggttggggatatataggtcgagattcgaaagtaacgttttttcggatttttatttagaattagtcgggattgtttaaatttttatttatagtttttatagttttcgttatggttatggatttcgcgttttttattttgtttttttttattgtgtatagatttaatttttttattataaagggagattttttttaaatgttttaagttgattttatattttttgattttattaattttagatatttagtacggattttagaatggggtatttgattaataaatatttattaaattaaaattatgttttaattttttttttttcgcgaaagattgatgttttggaaattttatttaattttcgtggattagttttattttattttttttaggaagttttttttaggtagggtttttggtattttttgttggaaaagtgtgtatatttttaaagttattatagttatttttttgtagtatttatcgtaagttgattgtgaagttttcgagaatagaagtagtattttattttttttcgttttatttttttattttttttgagtattatagggtttggtttttaaagggatgtaaatgaaggaagggtttaaagtaaatgaaagaatattttgtagtaaggtttaaatttggggaggttttttaatttggattttaattttaaacgatgattatattttttttagttgtgagggatgggggtcgtttttttaggagttttttagaagtttatttatttaaagagagttttggttatttattcgatgttatggtcgggaagttaagtgaatattgaattttggttaagatttttattttttagtttaaagtgttttttgtttttttatatagttatgatattattaatagtatgtttataatgttgaatagtttattaaatggatttagatatattattttatttgttttttataattgtttaaattaggtatcgttatatttttatattttaaatatggtatgaatgtttaaatttaggttttttaatataaagtatatgtaaagttgatttgaaaagataaaattttataaaatatatgataaaatggttataataaatagtaattttttacggtatttttttatatagacggatatatatatacgtatatatgtatatatatatatataatttatttgttatattagttttttagggtttttataatatattattatagattgtgtggtttgaaataatgatatatttttttatagttttggaagtaagaagtttgaagttaaggtgttagtagagttatgttttttttaaaggttttaggaaaaaatgttttattgttttttttagtttttggtgtttgcgggtaattcgtggtattttttggtttgtagatgttttattttaatttttgatagtatttttatatggtcgttttttatgtgtttgtgttaaaatttttttttttttataatggtttattttgatttaatatgattttatttgaatttgatgaaaagattttattttttttttttttttttttttttttttttttttttttttttttttttttttttttttttttttttttttgtttttttttttttttttttttttttttttttttttttttttttttttttttttttttttttttttttttttttttttttttttttttttttttttttttttttttttgagataaggtttggttttattatttaggttgtagtgtagtggtatgatttcggtttattgtaatttttattttattggtttaagtgatttttttatattagtttttcgagtaggtgggattataggtatatagtatatgggattataggtatatagtattatgtttggttaatttttgtattttttgtagagatagggttttgttatgttgattagttcggtttttaatttttgagtttaagtaatttgtttattttggttttttaaagtgttgggattataggggtgagttattttatttggttaagattttatttttgaataaagttatatacgtaggtatttggggttaggattttaatatgtttttggtagataaaatttaatttataattttataatttgttatttataggaaagcgagaatataaaaaagaaataatggtattggaaaagagttaagggtaatatttgggggatgttaagatgagtagaagggaaaagagatagtgagtatagagggtgtattttttagggagggttaaatttgagtatttggtttggaaaattagagaaaggagaaagatggtttttaaaagttaaaagaggaaaaagtatggtaggagtggagaagttattaggagggtggaagagttgttttttagggagggagagtaagagttattttatttttggggaaatttagtgaaaattggggtaagtgttaagagatggagatttacggtattgagtttttttttttattagagtggtttttttgaggagttaggggtttgtaagtttttaaagtatatttttatagaaattttggggttatgaagttattttgtttttttttttagatttgattttgttgtttgttttatatttattgttgttattaatttttatatagttatttaatttaggtgttatttttaattttttttttttttttatttttatagtttttgaggttttaatttttttgatgttagcgtttattataggattttatttattttttttttagtattgtttagattagtttttatttggattatgatagttgttttttttatttttttgtttttagatttattttgtttaatttattttttattatttaggttaaagtttatgtttttttaaaattttattttgaaaattttttgatagaagagttgaatgaattttatagtgattatttaaatattattatttatatttttttattagtattttattgtatttgttttattaaatatgttttcgtcgatttatttttttatttttttatttattttataattttatgtattttaaagtaagttgtagatatttaaatgatttttaaaaatataatttggttatgttagaatttgttggatttttaataatgttttttttttttaaaggataaagtttgaattttacgttggtttgtttttagtttaatttttgtttttatttgttttttattttttattttagaaaggttaaattgtttaaaattttttatttattatattgtttatatttttttgattcgtttttattgttttttttttttagtttgtttttagttttttagggttttaaacgtttttttttttgaaagttttttttgattttttattttttttcgatattggtttaggtattatatttataagtatatagtagtttttagggtatattttgattattgtattaatttttataattaagacgatttgtttatgtgtgttttttatttttattttaattgagagttttttaaaaatttagggattttgttttatttgtttattgtttttggtatttagaatagtttgtggtatgtgtgggtgttttataaatatttgttgagtgaatgtattattggttttgttttttttaagagtattttttgtttttgtattagttttttttatataatatggggttaggtttttaatgtagattttagagagttaagaaggaagtaaagaatattgagtgttattcgtgttttttagttaaagattttttaggaatataattgttattaaatatgttgggtttattattttttgtagtaatggagaatgtattttatggggagtgtgggatattttaataagagtgttaggaaaaaatttatgatagggtttgggttttggttaggtgatttggggaaaggtttaaggaagtgggggtttgttttggattaatgttgttagaaagtagagtagattttgtgaatgaatatttaaataaatattttttatagggaggggagattagaacgaggggaaagttataattggtaaagaagtagtaaatatttttgttaattaagagaaggggtgtttggtattttgtgggtggtatagtgtttttttttggatttgtgtttagaaaaatttgtgaagtagttttgtattgttttattttattaaggtttaggagtaaatttgtttgagattggtattttgtaatatagtttatgtttattaggtgaataatatggtttagttttgttaggttaatttttgaatgttagaggttgtttttttttttttttttagtgtttaggttgggtattgggaaaaaagatgaattagtgggattggagtatgtgtatagatatgtgtagaatttagtttaatgtaaaaaatttttttttttttttttttttttttttttttttttttgagatagatttttgttttgttgtttaggttggagggtagtggtgcgatttcggtttattgtaagttttgtttttcgggtttatgttatttttttgttttagtttttatagtagttgggattataggtgtttgttattatgttcggttaattttttgtattttgtttagtagagatggggttttattatagttagttggttcgattttttgatttcgtgatttatttgtttcggttttttaaagtgttgagattataggtttgagttaacgttttcggttataaaattttttaaatagaggaagtttggagtttatttttaaggtgtttatttttttaatttaggtatatatttttaggttatagtgttgatatttttagtttttcgtagttatatattttatggttatggaaagggatacgtggtttaggtttttggtggttttgagttgtggggagggaggagttagtggttttggttgtattcggatatttattgttttgttagggtaaatattttgaagtttgtttttttggttgattgtttttgtttgttattttgtttggtattatagttttttagtaatttttaaatttatttatttgagttttgaggaaaatttattagatatgaattttttgttggttttgtgatagtggtttttgattagacgggtttagttgtttggattttaagggttttgttgtttttgttttttgttttttggggtaatgattttatttttgtttttagttttaaggatttagtgatttattgtagagtaaattaatagtatggtagatgtttggtatttgaggtttttgatattttttaaggatatggggttgtgatttttttttttttagtttggtgtttttgtttgattgttagtgattttttttttttgataaaggttttaatattttttttaaattagatagttttgaagttgttgttttttgtttttattatttttttttgtataaggttgaattgattttgttttgaaattttttttatttttgttttttatatatatatttattaatgtatgatttgtttttttacggttttttgttttgtgtttttttattttttggtttaaattttttttttttttttttttttttttttatgaagtttttatgaagttttgttttgttatttaggttggagtgtattggtatattttagtttattgtaattttagtttttcgggtttaagggttttttttgttttagttttttaggtagttgggattataggtgtttattattatatttagttaattttttgtatttttagtagagatggggttttgttatgttggtttggttggtttcgaatttttgattttgggtgattcgtttattttggttttttaaaatgttaggattataggtgtgagttatcgtgtaagtcgaaagttttttttagttatgatttttttgaattttagtttgatttgattttttaggatatgtttgtgtgtatttatatatttgtgttttatatatatagaaatgtgtgtgtgtgtgtgtgtgtgtgtgtgtgtgtgtgtgtgtgtgtgtatttgaaatagttataaattagggatagtgggaatagtgaggatatgtgtttgtgggattaagtgaggttgtggttataagaaaaagttatatttttgataatagtaaattaataatagataatgtttaaaattagaagagtaaatagtaataatataatttttgtatttatagatgtgaaggtgaatattaaaatagttaaaagagttgaaagtagtggagatgggggtgagggttgttattttaaaaaattaatttattaatttgtttaattttttatttgtatatataattgcgatgaaaattttgaaaataatttaattgtgttttgtgttttttttttttttttttattagttatgtgaagatttgttatttatttatttttttagtttagttttttatttttgttttttttttttcgattttgtttttaggggttaggtttgtttatttttcgggattttttttatttgattgttttttttttgtttttaatttatttatttgtagatagaataatttttataatttgtgttattagagtgtgttttatttttatttgaaaattttttgagatttgtttagtgtaataggattgagttatgtttttagtatgataagttttatgttttttttagtgttagttttaggtacgtagtttgtattaggtttagatatattttttttttttggttgttttggttttgtattttttttgattaaaattttttttttgtatgtgtttttttattatgggttataatttatagtatataatgttttgtattgatttttttttttaattacgattttatagatttttttatgttaatttaaataggttatttttattattttttattgttatatgaatttaattatataatgtatataaaaatattttgtatgttatttggtatataggaagatttaaatatatttttattttatttaagtttttattatcgtaatataatgaagaaatattttttgttttttttaatattgtagttgtaagatttttttttaattgttattatagttatgtattgtgttttttaaaaatatttagtatttttttttattgggataaattttgttatgttgtttaggttggttttttatttttgggttaagtgatttttttgttttatttttttaaagtgttgggattataggtatgagttattgtgttttgttttatgtaatggttttaaatagattacgaatttaattaatattattattttttttattatttttttagtttttttatttagttttttatatattttttttttgtggattttaattttttggagtttttttatatattttgtttgtttgtttttttttgaaatgttttttgttatttttttttattatttattggggaagtggtttttttttttttagatattcgttgtaaaagtttttttaagttgtttttttttagaggagtttttagtttatgggtagtttcgttttttatttggtttgtattatttatattattttttaattagaaggttagttttttgaaagtagggcgttttagtatttttagtgtttagtatgttgtttggtatataaaaagtgttttataagtgtttgcgggatgagaatttttaatttttaaatgtttaattttatttttttatgtaatatgttatatatagaagaggtgttttgtggtatagaggagaatgtatttttttattagttgtgtgattttggataatttatattatttttttgagttttagttttttgattcgtaaaatgggggtaatgagatttatgaggaatgaatgatgaaataaaatataagaagatgttttaaaaatgtaaaaagtattattattattttttttttaattttattttaaattttttatagttttgataaaattttttttttaggtttagttcgttttgtaagattatgttttttttttcgatttttgatttttatttttttttttttttttttttttttttttttttttttttttttttttttttgagatgtagttttgtttttgttgtttaggttggagtgtaatggcgtatcggtttattataattttcgtttttcgggtttaagcgatttttttgttttagttttattgagtagttgggattatagatatgtattattatatttagttaattttgtatttttagtagagatagggtttttttatgttggttaggttggtttcgaattttcgattttaggtggttcgtttgtttcggttttttaaagtgttgggattataggtatgagttatcgtgttcggtaattttatttttttttggtgttgttgtttcgtttttttattttttttttttaatttggtaggttttgtttttgtttaatttttttttagtgtttatttttttgtagtttttgtttttttttttttagtatagttttgtttttatagttttttggaagttattttaagaatttttataggtttttttttttttgtttttttgaagtttttttttgttttttttgttatatatattatttaggggttaggggagttttatatgggcgtggataattttattaagcgttggttttaaggacgtttgtaaaggtggttagaaatggtagataaaagggtacgagatgttatgttttgcgtagggaggggttggatgaggggaattagagagtttaaggtaggttttagggtaagttttttttttagagatttagggtaggtaggatagagttggaggggtgtgtttgggagataggggaggtaatatttgaggtttaggaggtagttagagggagtggtttttgaattaattggtaggttggatgttagtagcgtgttagtgatgttttagttattggttattagaggagaggaaggaagggagggagggagagtttattatgtggattaagatatagaggtatatggggtttgttgtcggttggtttttagtttattaggtttttttaggttattgtgcgttgttattttttttgttgggtttttttgttttgtttcgtgttgttttgtatgtttttggtttggtttttttgatttatagtttacgattcggatattttttttaagtttttgtgtttttgggagttggtgttttaatattgttggggaggaagtatttgagttttagtatgtaggttttgatttttattttgtatggtttttagttttttttttgtgattggaatgtgatataggtttttggagtagttaagaaagtagtaaaatttttaatgatttgaaaattataaaattataaaattattattgtgttaaaatgaattatttttgttttttttgtttttttattatttttaatgttagatatgtttatatcgggttgtatagtttatagtattgttggatggtttataggttttttggttttatatgtttaatatgttatttttgatatttttgtttaggttagttttttatagttttttttattgtagttattggtagttttattttttttatggtggggttaaattcgttagagttttttgtttttttttttgtttttatattttataattaatgtagtaatttacgtttagaagttagtttttttttattaattttaatttttggtaggtttattttatttagtattgaatgaagttttgataatgataaagttttgtatagtcggttagttttatttttgattttttattttatattcgttgttttttttgttttagttatatggttttatgttaaattttaaatatattagtagttttagtattatagtttttgtttttgtttttttttttatttggatgattttttttttagataagtatttgacgattttttttattatttttaaatttttgtttaaatagaatttattgagattgtaattttatttattttatttagtattttatttagtattgagaaggtttatttttttaggtgatatttaagggtagatttgagagatgaataagagattattatgtttagagaggagagaagggtattttaggtataggtaatagttttgtattaatttagaggtaagaataatttgggttaatttaagtaaagttgacgtatgatgagttgggagtaaagatggtataagataataatgaagatttagagattagagtaagtaaaaatttaggttttagtagtggaataggtaagagtgtaatgggggaagattcgaggttattatttgttaatggtattttttagagttgtataaggtagttattttaaagagagaaaattatgttagtatttgtgtttttttttttagttttatgttgtttcgtggtatttattatatattatatttatttatttgttaatgagttgtttttttcgttagagtttagaatttttatgaggttaggtttttgtttgtgttgatttttattgagtttttagtttttaatattgtatttgtatatagtaggtttttaataagtatttttgaacgaataagtataaattatttttattatttttaaaataaattttttgatataattgtttttattttatagttataaaattaataagagttaagttaaattttgatattttattgtttttaagtggtgttaatgtttttttatattgtataattttttatttggtttagttaaaatgggtaaaggttttagtttttttaattttaaaatgaggagtttggattaatggattgtttatttgttggaggatgatatttgtttttttttttagggttttttttgttgttttagtttaagttttttttttttttttagttttttttttttttggggtttggataatagaggttaaatggtttaaaggtttattgggagattgtgaattatagaagtataggaattttttttatttttagttgtttatattttatttattttattggttgaggtttcgattttgttaaggaaataggatgattatagaatagaaagaaaggatagagaataaaaaggagaaaatgatgaaggggagggtagggaggaaggagagaaggatagagtaaataggtttcgtgtatgttagtgaatattttgtagagaggagaagtagttattgtggattgtggtttaattgaaataaaatattttattattttgtttttatttttttttttgtgattttattttaatatttaaagtttattaagtatgtagtttatttttgtaatagttttgtaattatatagttatttattttagaaattagaaatttatgattgattttttttttttttattatttaaaggttattttaatgtttttgttaattttatttataaaatatattttaaattggtttgtttatttttagttttattggattttattattttaagttattatttttttttatttaaattattggtatagttttttttttttgggatgattgtcgtatataattttgggaatgttattagtaggtagtgattttgggttttttttattttatttttgtttattttattattaaaatttaagattttatttgttttagtttttgtttacgtttttattattattttgtgttatttttatttttaatttattatgtgttaattttgtttaaattagtttaaattgtttttgtttttaggttgttgtaaagttgttatttgtgtttgtaatgttttttttttttttttgagtatgatgattttttatttattttttaggtttttttttaaatattattttggaagatgggttttttttaatgttttttatttaaattaaggatttttgtttttagtttttgtgttggagatttgttaaaatgttagatttattaaataaaagtataggatgtttatttaaatttgaattttagataaataataaataagtattttgtgtaagtatgttttatgtagtatttgggagatatttatattaaaaaattattgtttatttgaaatttaaatttaattggatgttttgtattttatttgttaaatttatatatatggaatgattttattttttttttattgaagagattgaaaagtaaaaaattttattttttagaatttttggagttaggattttggatatgaaataagtttttttaattaaatgtatttttatgagatttgaaatgtagaagtgaggtagaggttatttttttatagaagagtatggatgagttttaataaatatgaaatgtgtatgggggtagggtagttgggttcgtggttgttatgttagtagtagttgtagtattattgatttatggtgattgattttgaagttaataaattagttaggatattttgattttttttttttttttttttttttttttttttttttttttgagacggagtttcgttttgtcgttaggttggagtgtagtggagtgattttgtttattgtaatttttgttttttgagtttaagtaatttttttgttttagttttttaagtagttgtgattatattatgtgttattatgtttagttaatttttgtatttttagtagagacggggttttattatgttggttaggatggtttcgattttttgattttgtgatttgtttaatttagttttttaaagtgttgggattataggtatgagttatcgtgtttagttaatatttttttttttaattgaaataggcgtttaaaagataggaaggaatttgtttttgtatttttgatagatgaggattcgaaagttttttttatttatatattagtaagattatttttttgggaattaatttttttatttatattgtaagggttagattatatattgttaatgttttttataattttagtattttataaatttatgattttttgaagtttttaatagaggtgggagttagaattaaattagttatatttggtgtatttattagcgatttttgtataggttaataaataatttgtttggaagatttatttttttcgatggggaagtggatatggaaatgagatgatcgttttgaatgtaaataatgtgaaggggaataggaattagaaaaagaaaattgagagaaaagattattaggataaaatgagttttaaaatatataaattatgttgagtgtggtagtttatgtttataattttagttttttgggagatgaggttaaagtgggaggattgattgaagttaggagtttgagattagtttgggtaatatagttagattttatttttataattaattaattaattaattaatttattagattacgtaaatattatatttatagttatttagtggtattttattgtttttagaataacgattaattttttattttggtttttaaggttttatatagtttggtttttagtatttttttaattttatattaaattattgttattttattttatacgtttaagattttttttattttagggtttttgtatttgttgttgttgtttttttttaattttttttattgttggttttttttttttatttttttagaggagttttttttaatattttattaaaagtagtgtatattttttttagttaattttttttatattatttattttgtattttttaaagtattgattataatttataattattttgttaatttatttgtttatttgtttattgttggttttttttaatggaatttaaattattagaggataagggattatggttggtttgttttttattttttttaatttttagaataacgtatggtatatagtaggtgtttagtaaatagttgttgaatgattaaatgaatggatgaatgaatgtatagtttttaaaaggaaattgttggttaggtgcggtggtttatatttgtaattttagtattttggtaggttgaagtaggtagattatttgaggtaaggagtttaagattagtttggtaaatatgataaaattttatttttattaaaaatataaaaattagttgggtgtggtggtatgtgtttgtagttttagttatttgggaggttaagttaggagaatcgtttgaatttaggaggtagaggttgtagtgaattgagtttatgttattgtattttagtttggtgatagagcgagattttgttataaataaataaataaataaaaaaaaaatggaaattgttaagggtttggagaataagaaggttttgagaaaattgagaagatggggggaggagttaagatggttaaataggaatagtttcggtttatagtttttagcgtgagtaacgtagaagataggtgatttttgtatttttatttgaggtttattttattagggagtgttagatagtgggtataggttagtgggtgcgcgtatcgtgcgtgagtcgaagtagggcgaggtattgttttatttaggaagtataaggggttagggagtttttttttttagttaaagaaaggggtgatagagggtatttggaaaatcgggttatttttattcgaatattgcgttttttcgacgggtttaaaaaacggcgtattaggagattatatttcgtatttggtttagagggttttacgtttatagagtttcgttgattgttagtatagtagtttgagattaaattgtaaggtggtagcgaggttggaggaggggcgttcgttattgtttaggtttgttgaggtaaataaaatagtcgggaagttcgaattgggtggagtttattatagtttaaggaggtttgtttgtttttgtaggttttatttttgggggtagggtatagataaataaaaagatagtagtaatttttgtagattgaaatgtttttgtttgatagttttgaagagagtagtggtttttttagtacgtagttggagatttgagaacgggtagattgtttttttaagtgggtttttgatttttgattttcgagtagtttaattgggaggtattttttagtaggggtagattgatattttatacggtcgggtattttaatagatttgtagttgagggttttgtttgttagaaggaaaattaataaatagaaaggatatttatataaaaaatttatttgtatattattatcgttaaagattaaaagtagataaaattataaagatggggaaaaaatagagtagaaaaattggaaattttaaaaagtagagtttttttttttttttaaaggaatgtagttttttattaggaatggaataaagttggacggagaatgattttgacgagttgagagaagaaggttttagacgattaaattatttcgaattatgggaggatatttaaattaaaggtaaagaagttgaaaattttgaaaagaatttagaagaatgaataattagaataattaatatagagaagtgtttaaaggagttgatggagttgaaaattaaggttcgagaattacgtgaagaatgtagaagttttaggagttgatgcgattaattagaagaaagggtattagcgatggaagatgaaatgaatgaaatgaagcgagaagggaagtttagagaaaaaggaataaaaagaaacgagtaaagtttttaagaaatatgggattatgtgaaaagattaaatttatatttgattggtgtatttgaaagtgacggggagaatggaattaagttggaaaatattttgtaggatattatttaggagaatttttttaatttagtaaggtaggttaacgtttagatttaggaaatatagagaacgttataaagatatttttcgagaagagtaattttaagatacgtaattgttagatttattaaagttgaaatgaaggaaaaaatgttaagaatagttagagagaaaggtcgggttatttttaaagggaagtttattagattaatagcggatttttcggtagaaattttataagttagaagagagtgggggttaatatttaatatttttaaaaaaaagaatttttaatttagaattttatatttagttaaattaagttttataagtgaaggagaaataaaattttttatagataagtaaatgttgagagattttgttattattaggtttgttttaaaagagtttttgaaggaagtattaaatatggaaaggaataattagtattagttgttgtaaaattatgttaaaatgtaaagattattgagattaggaagaaattgtattaattaatgagtaaaataattagttaatattataatgataggattaaatttatatataataatattaattttaaatgtaaatggattaaatgttttaattaaaagatatagattggtaaattggataaagagttaagatttattagtgtgttgtatttaggaaatttattttacgtgtagagatatatataggtttaaaataaaaggatggaggaagatttattaagtaaatggaaaataaaaaaaggtaggggttgtaattttagtttttgataaaatagattttaaattaataaagattaaaagagataaagaaggttattatataatggtaaagggattaatttaataagaagagttaattattttaaatatatatgtatttaatataggagtatttagatttataaagtaagttttgagtgatttataaagagatttagatttttatgtattaataatgggagattttaatattttattgttaatattagatagattaataagatagaaagttaataaggatatttaggaattgaatttagttttgtattaagtagatttaatagatatttatagaattttttattttaaattaatagaatatatattttttttagtattatattatatttattttaaaattgattatatatttgaaagtaaagttttttttagtaaatgtaaaagaatagaaattataataaattattttttagattatagtttaattaaattagaatttaggattaagaattttatttaaaatcgtttaattatatggaaattgaataatttgtttttgaatgattattgggtatataacgaaatgaaggtagaaataaagatgttttttgaaattaacgagaataaagatataatatattagaatttttgggacgtatttaaagtagtgtgtagagggaaatttatagtattaaatgtttataagagaaagtaggaaagatttaaaattgatattttataattataattaaaagaattagaaaagtaagagtaaatatatttaaaagttagtagaaggtaagaaataattaaaattagagtagaattgaaggaaatagagatataaaaaaattttttaaaaaattaatgaatttaggagttggttttttgaaaggattaataaaattgataaatcgttagtaagattaataaagaaaaaagagagaagaattaaatagatataataaaaaatgataaaggggatattattatcgattttatagaaatagaaattattattagagaatattataaatatttttatgtaaataaattagaaaatttagaagaaatggataaattttttgatatatatatttttttaagattaaattaggaagaagttgaatttttgaatagattaataataggatttgaaattgtggtaataattaatagtttattaattaaaaagagtttaggattagatggatttatagtcgaattttattagaggtataaggaggaattggtattattttttttgaaattattttaattaatagaaaaagagggaattttttttaatttattttatgaggttagtattattttgatattaaagttgggtagagatataattaaaaaagagaattttagattaatatttttgatgaatattgatgtaaaaatttttaataaaatattggtaaattaaatttagtagtatattaaaaagtttatttattatgattaagtgggttttatttttgggatgtaaggttggtttaatatatataaattaataaatgtaatttagtatataaatagaattaaagataaaaattatatgattattttaatagatgtagaaaaggtttttgataaaatttaataatgttttatgttaaaaatttttaataaattaggtattgatgggatgtattttaaaataataagagttatttatgataaatttatagttaatattatattgaatgggtaaaaattggaagtattttttttgaaaattggtataagatagggatgtttttttttattatttttatttaatatagtgttggaaggtttggttagggtaattagttaggagaaggaaataaagggtatttaattaggaaaagaggaagttaaattgtttttgtttgtagacgatatgattgtatatttagaaaattttattgttttagtttaaaatttttttaagttgataagtaattttagtaaagttttaggatataaaattaatgtataaaagttataagtatttttatatattaataatagataaatatagagttaaattatgagtgaatttttatttataattgttttaaagagaataaaatatttaggaatttaatttataagggatgtgaaggatttttttaaggagaattataaattattgtttaaggaaataaaagaggatataaataaatggaagaatattttatgtttatgggtaggaagaattaatatcgtgaaaatggttatattgtcgaaggtaatttatagatttaatgttatttttattaagttattaatgattttttttatagaattggaaaaaattattttaaagtttatatgggattaaaaaagagttcgtatcgttaagtttattttaagttaaaagaataaagttggaggtattacgttatttgattttaaattatattataaggttatagtaattaaaatagtatggtattggtgttaaaatagagatatagattaatggaatagaatagagtttttagaaataaggtcgtatatttataagtatttgatttttgataaatttgagaaaaataagtaatggggaaaggattttttatttaataaatggtgttgggaaaattggttagttatatgtagaaagttgaaattggattttttttttatattttatataaaaattaatttaagatggattaaagatttaaatgttagatttaaaattataaaaattttagaagaaaatttaggtattattatttaggatataggtatgggtaaggattttatgtttaaaatattaaaagtaatggtaataaaagttaaaattggtaaatgggatttaattaaattaaagagtttttgtatagtaaaagaaattattattagagtgaataggtaatttataaaatgggagaaaattttcgtaatttatttatttgataaagggttaatatttagaatttataatgaatttaaataaatttataagaaaaaaataaataattttattaaaaaatgggcgaaggatatgaatagatattttttaaaagaagatatttatgtagttaaaaaatatatgaaaaaatgtttattattattggttattagagaaatgtaaattaaaattataatgagatattattttatattagttagaatggtaattattaaaaagttaggaaataataggtgttggagaggatgtggagaaataggaatatttttatattgttggtgggattgtaaattagtttaattattgtggaagttagtgtggcgattttttagggatttagaattagaaatattatttgatttagttattttattattggttatatatttagaggattataaattatgttgttataaagatatatgtatacgtatgtttattgtggtattatttataatagtaaagatttggaattaatttaaatgtttaataatgatagattggattaagaaaatgtggtatatatatattatggaatattatgtagttataaaaaatgatgagtttatgttttttgtagggatatgaatgaaattggaaattattatttttagtaaattatcgtaagaataaaaaattaaatatcgtatatttttatttataggtgggaattgaataatgagaatacgtggatataggaaggggaatattatattttggggattgttgtggggtgagggtaggggggagggatagtattgggaggtatatttaatgttagatgacgagttggtgggtgtagcgtattagtatggtacgtgtatatatatgtaattaatttgtatattgtgtatatgtattttaaaatttaaagtataataataataaataaataaataaataagaaaattgagaagataaatagtgaatatttaggggagaatttaaatgatggatagaaatattagtgatattgataggtgggttgttggaaggaaagagaataagtgagtatttatatgaatttgaaggatgggtaatattttagagaaattgttagttttaagtagggatttaaagggagagaaaggaaggagttttttaggagggatagaaaagagaaagtaaagttttaaaagaaagaaattaatatttaaggaaaagaatatagattttggagttagtaggtttgaattttagttttggttttgttttttgtcggttgtttgagtttagttaaattttttattatgttagaattttaggggttttagtgtaatatggttggatttggttttacggttgttatagggttaaatgagagaatggattatgaaggtgatatttttataatatagttatgtatttgagtattaagattgattggattaatttggttggatattttttttttatttttgttttaagttattttttttaaaattgttttttttattagggtaagttttatttagagtttttggagtagttgtataggaaaattgttttggtttaatagaatttttagttatgttaaagtatagtgtaaatatttaagtttttaaaaaaatgagttattatagaaataattaagattgaagaaaatttttgggaagggtatagtgagtgggaattgagaaagaattatggttttttttattttgattttttattttttagtttttttttttttaatttagttttttttttagagatgttttatattttttgtttaggtttttttattttttttttagttaatataatttttattttttttataggttatttttttttggaagattttttgaaatgatttttatttgttttttaatttgttaatagaatttttttttatttttttttcgttattgtatttttaaaatttggtaatgatagatttaggttgatgatggatatattttatttgtttttttatatattttaatttagtaatgttaaattttgttgatgatggatatattttatttgttttattatattttttaagggtagggattatgattgttttgtgattagttttttaaatttttttattatatttatttttttttttggaaagtttttaaagattagtggggtttttaaaagtatgaggatgttgttaatatggaggagagagattgaaggataaatgaaaggatagaagaaaaaaatgaagagaaggaaaagaagggatgggttaaggtttgttttatttttgatattttttagtgttatgtatgggtattaagttgttatattttataatattataagtaggaattttggaaggagttggaaaggggtgggaatagttatttaggagatatttatattaaggaaggaagatgtggattttagtagagagataggatttcgttatggttaattggattaagttaagttaagttgatatacgtaaaattatatttatttttttggttttttggaaatagaatgaatttagtggtgattagagtattaagtatagagttgttagggattttggaaagggagggagaaggttttgagaagtgagatgtttttaggtagagtttgtttttaaatgtttttttttttattggtgttttggaattattaggtatgaatttattgtaatttggacgtaaaggttgagttgatgttttgttagtaggaatttttattatttggttatggaaggtaaatgataattagttatgaattttttagttagattgagtattatatgttttataatatttgagcgttttttagtattatgtttggtatttgttagtgaggtatgattattggttgagaaggataagaaggtttaagtagagttaattaaatgatttttttaggttgtttaattagtgtaatgagtaatttaataattggatttaagtttattaaggtttattgtgtgttaggtgttattttaggtgtagggaaagtagtagtaaatatgaaggttaggtttttgtttatttattttttattggatagagatatattaaaagtttataaatagattattgtagatagtaataaatagtatgaagataataaatatgggtaaagagatagtgaatatttttgagaaagattatttgagatataagtggtaaaagaagttttttttgaatgttatttttgggttgagatatgagtgagaaaatggagaaagttatgtgaagttttggaggagtaggggtttaggtagagggaatagtgagtgtaaaggcggtgtagtcgtattagtagtggttcggggaacgagaagtagaaggtattgtagttagagtataaggagtaaaatggagtgattagtttatatgaatagtcgttatttaagattatggtttttttgttagttaaatattgtaattatttggaaagtttttaaaagtattgatatttgggatttatttttagggtgttcgtttaattggtttgaggtgttatttgggtattaggagttttaaagttttttagataattttaatgtgtaattgaagttgttaatcgttgataagtttatgagggttatagtaaggtatttggattggtgataattgaggtttttgaggagttttagagatatttttttagtattttaagtttagatttaaaaagattttgagaggttttggagttggggataagttaggataatgaaggaaaagagataatatgagattgaaaagaaggttaagagaggtagagatatttagaaaatatgataaattggaaggtgtaataatatagaagtgtaaatagatttagagagttagagattggaggagaaaaggtaattttgtgtattagttttttattgatattgtaataaattattataaatttaggagtttgaaataatatatatttgttattttattattttgtagtttagagtttgaaatgggttttattgggtaaaaattaaggtgttagtagtgttaggttttttttgaatggtttgttagagaatttattttttcgttttttgtagtttttagaggttatttatttttttagtttgtggttttttgttttagtttttaaagttagtaatgttaggttgattattttttatgttgttatttttttatgttatttattagagtatagaagtgtattttttataaaatagattttagttataattgtagttttatgtttgggtatttgtgtgttttatgagtattgagtcgggagggttgttttaagatgaatgtacgtgtgtttgtttgtgtaggtttgtttattagggtgttatatttgagtgttttttcgataagtatgggggaggtagaagaagagtgtttggagggggtgtttaataaagttttgttgttttataaagatttattgttgttatattgttatttttattaataataaaattgatgatagagtatttgtttttttgtttgttttttttgagtatgttcgtttgtttttaaataatattggatatttattttagtgatatttaatgtatatgaggttatttatatatattatatttagttgtgatgtttgtattatatgaatgtttttgtttgtaagtttgtgtatatttgggtatttggatattgatggatgtagatatatgttatataatagtgtgggtgattatagttgtagatatttggatgtttatttatgtataaatttttatgagtatttagttagttaggtttggtattggaagggtagagaagttaggaagaggagggagtagggaggaagaggagaggtggggagaggagtaggtaaggagaaaaagagagaatggaggtgaggaatgaaggtataaaggaatattagaaaaaaattaggaagtaggagggggttttagggatttgtaattgaaaaaggtagggttgagttatagtaagaatataagttagaagattagggtagggttttatttttggttatttttttgttatgtgattttggttattttagttttttgggtttttgtgaattattagagttgaaatagataatatcgggtatattttaaagaaggaaggaaagagaaaattggtaataaaattatatacggggaaaaatagagagaaagaattagaaagagagatttacgaagaaagtaaggagaggttttgggagttggttagaggtagagttgaaagagttttgtttcgattttttgaggtcgaagtgtgggcgtttgttttttattttttattttagagttgtagaatgtttttaagtttttaataggtaaggaaggaagatggaaaggcgagaggtattaggaatgaaaattatatattaatatttagaggtttgttaaagttatataaattaggatttgtgttttcggtttttagtttttagatgtaggtgtgttagttatttggaatgattcgtattttggtaatgtgggcgtatatgttaagagtgagtttgggtattcggtttatgcgcgtattataggcggaggggaaggtaaaattggggtttttcggggggttatagggggttattttttttatatagggttatttcgttttagagcgttttttagtgatcgttttttaggttttgggaattaggtgtgttatttttttttttttgtttttttaaattttattcgggaagtaggagaattagatgaggcgttacgtaaggtttggtgtttatttttcgtgggagttttttttttttttataaagtttgatgtggtggagagatttgacgagattgagattttggttgaagagagaggtaattttaggagaggggcggaaagcggtaaaagttaatgcgggagtcggagagaagggtatttatatagtaagtagtaggggcggttcgttatttgcgcgttcgaaggcggttacggtggtcgcggaaggggcggcgtttagattttggttttttatggatgcgttcgagttgggttcggggttggtggagcgtttggagtagttggcgacgtgttttttgtgcgggggttttttcgaggattcggtgtttttggcgtgcgagtatagtttttgtcgcgcgtgtttggttcgtcgttgggggatttcgtcggcgatcggtatcgaggttttttttatcgtttgtttttgttgcggtttgtcgtgttttcgtcgtagtttgaggtttaatgtgcggttggcggtggaggtgcgaattagtcgcgagttgcgagagaagttggttgagtttggggttcgtgcggggagacgtcgaggggggcgtatttttattatgggttgtttggatttgttcggagaggtgaggttgggcgcgcgtcgcggagttgttggtggaagcgggagattttcggggaagtcgggaatggtacgtttggagtcggaggttttgtggaagtttaggtaaaggatggggtggggagagaaaagtaaaggatgagggggcgaggattttgggtttttaaggtgagaggcgttcggaaggacgatggatggagttgatatttggtttataggggaggaggttggatcgatgtttgagttttgtgagaggggttggagagaagagattggggaggtagagaaggggtatcggatagaacgcggagagttttggagtcgtcgcgaagggtatgggaattgtagaagttttggtagggtagtcgtaggcgttcgggaggaggagagttggcggaggggagggagcggcgggcggaagggagagtcgatttagttgagggtgaggaggggttttgggaggatggtgggcgagggtagaatttgtttagaggagcgggagtaggaggttgggttggtgggttgggggcggagaaaaagttggggaggaggggattgataagaggatggaggaagggagtaaggggttggggtatatttaaattttttcgtagcgtcgtgggggttggtttcggattttggtttaagttaagttttgtgttgtttgttattgttatttcggttttttttaaggttttaggtaggagcggttaggggtggaggcgaggtgcgggagaatagtcgttggggtttttggtttttttttatattttagttttattatttatttatttatcgcgttttttttgggtttcggttttttggttattaattagtttatttttttgttcgatcgatttttgggcgtttgggatttttgattggtttttttttagtagttaagttggttttgggttttgtttttgttttttgaagtttttatagatttaattagtttgaaagtaattggtataattatgtaaattgtttttttttttttcgttttattatatcggtttgttttagttattagtattagatagtgaagtggaggggtcggtattttagtgtttggaggggagtatttagtgtttttttttggtttttatagtattttgtggatttgttgggttttttgggatatatttaagtttagttgtttttttggttagggtttagagatataaagtaaagggtttaataaatgttattgggtttttattgtaagaggggaagtagttttattgtaaggtttttatatattaatttttagttcgagggttttgggtgtgtgtttggtttgtgtgatggagggaggaagggatagatgtttttttgggatgtattggggaaggtagataaggatggggtcgttgaaagagatagagaatgggattgaggaggtagtaaggaaggtaagggttttgaggataagaaatagttatggacgagtttgggaaaagagaattgagaatttttggggagtggaaagggggaggatagtggggatggagttaggaggatgagggaaaagtgatggggtgagaggaaggagggattatgaaaggtgaaggaggagaatgagagggaaaggagtatagtgtgtaaagaggtgagattattttgaaaggtgaggagggatattgttaatttagatagaatttatttgaggaggggagagatagggaaggatgttttagggaatgaagtttagagtttatatttatgtttgtttttgtttattttaggatatgaggaagatatggagacggtgagttttatttttttgtttttttttttttttattagttgttatagttattacgtttttattgggtttatatttttgtttttattaataggtaggttttttggggtatagttttattttttttttttttagagatgtgagtggggtatgcgtgggggtattaggattagagggttgattttttgatttttttttttatttgtgtagatttgaagttttaatatttaagttatttaatttagaggatgatttttttgaagattatttagtggttaaaaaaatgttttatagattgataggtaaggaaagaagaagggagggaagggaattgaatgaaagtttgtgttagatttttttttttttagttttaaaaagtgattaggttttttttgatgtttgtattagttttttagtattgttttaatgaagtatcgtaaagtaggtggttgaaataatagatatttattttaaagtttaggaggtagaagtttgaaattaaggtgttagtagtgttggttttttttgacggttatgagatagaatttgttttatgtttgttttttagtttttggtagttttatatgttttttgggtgataggtttgtatatttttttttgtatgtatttgtttttgtgtttaaattttttttttttgtaagttagtaatttggattagagtttattttaatgatttttattttaatttgattatttatgtaaagattttgttttaaaataaggtaatattttgaggtttggaggattttaatttatttttgtgtgtgtgtgtggagtgggggagggtatagtttagtttataataatgtttattttcgattttttatattttagttatttttttttttttttttttatatatttaaataatagatttttgaaggttaggtgttttttaaaaatttttgtttttattatttttcgttatttttttttggaaggggattttagtatttttttgatttttttttttttatttatttttaagaagaagggtgtttttatttttttttaaattgtttagagaaggtggtttattattttggttatttattattttgtttagtttagattgtttttgatatttttaatttagaaatttttttttaaagtattttatatatataaggttaatggttttttttttggtttttggttattattatttgttttttttttttgttttataatttttatagaaataggattgtttattttattttttaatttttgtgggtgggtgggttggttttttaggatattttggatttttttttgtgttttttttattatttgaggttttagtattagtacgattttttttttagatgaattttttttattttgttgatttagtttttatgttttattttagatgatgtagattgaggtattagtttttatttttttttcgaagttagattagttttatttttttttttttaattttataaacgagataattttttatttgatttttttgttgtgttttttgtattgggttagtatgatttttttttaggtttaattttatagaagtggtgtattagtataaggtttgatattgtttaggtttgttttttatatgttttttttttttttggttttgtagtcgttttttgagttgttgtgtggttattagtttttagttttttacgtgattttcgttgattattttttattttatttcgtttgtgatttagaaaatttttttatgaggttttttttttgttttttcgtttttagtcgatttgattttggattttgggatcgtatatcgtcgtttgtttattttcgtcgatcgtcgtagcgtataattggttttattagggacgttcgcgttttttgacggttttaagcgtttcgattagtttttagttgtgttgggtgcgtagggtttcggggtcggtcgttattgttgggaggtggagattgcggacgtcgttttttgtagagatttttttggggaggatgcggacgacgaggagagttattatgtagtgggcgcggtcggggaattagtgtaacgtaagggttgcgtaaggttgtgttttgcgggggtcgtgtgggtcgtggagggtcgcggcggtcgtttgtgggtttttacggtattcgaatttattttgttgggcggtgttgagttttcgtcgcggcgtattcgcgtggatttggattgggagcggggtcgcgtggttttttacgacggtcgtttattcgatttgttttacgttttttaggcgtttggttttttgggggagcgtattttttcgttgttttgtatttgcgattttcgtgtttcgtttcgtattgtattagcggaaagttgagtttcgtttttaattagaagtttggttcggttattggttttgtagttgttttttgggggtggaattttttatttatttttgggaatatatttatacgtttattgtaggagtattaatagtaatttatattttcgttttaaaataatgagattttatttggtttttacgtttttacgtttttgtttaaaattaaatttatttttgttttttggtttttagaatttttttttttttatagttattatagtattttttgattttttttatttaaattattttaggtttgtaatggggaataggttttttttattagtattggtaaagtgattatgatttttatatagaggttttgttggttaaatatttgatttttatttttgttatttttagttttagaagggtttagggttttttttatagatttaaggattgggttattttgtttgtttattgaggttttttttaaaataagaggtttgattttggtttgggttttgtggttttttgggaagttttgtattttttttgtaggattcgggggtggggagggataagttagttttttaattttttatgattgttttttatgtttatagttttttttttataagaatttttttgaaattttttttcgtatatatttacggaaaggaattaatggtgttatttttttttttttttttttaatttgggaatattttagatatttttaaatttatttttgtgtatagttttatatttttttttataagtataaatgggtttatatttaatatattttgtgattttgggttatttattttgtgtatttgtggtaataaatgagattttagtggtggtatggatttgattgatttttgtaattgtgtatggtaaaaggatcggaaaatgaaaattagattttagtaaggggtagagaggggttaagagaattgaatatttgggttgtcggagaaattaaagtttaggaagtaagaggtaagagtgtattataggggatatattttaatttttttgtttttttttttttttttttttttttagagatttaggtttttgggattatattggatttgtttttgaagttgaaaaataaaaggtagaggagatagtcggttttaagtgattaattttaagttagttttgttagaaattttaaataataggagaagggtgggaagaaaggatatgattattttttattttattttttataagaggtgagaatgataaggattttttttttaattttttttgagggtgtgagaagggttagtaggaggagaagggttgggagttttgaggttttttgtaagattttatattttataggtaaggattaagaattaggattaaatattttagtgggatagttttaaattaggattagtaagtaaagttagggcgtaaatttttggaatttgattgggattttggtagtgaaagttgggattgttgaaaatttaatttaagtgttcgttatttatgttgagagtgtagggttaagataattagattttaggataggtagtttggtagtgagaataaaaggaagatattgggattaaggtgtttagatttttcgagagagaagggtgggtattgggaggaaaaatgaggattggggaaatttaggaggttgggttttggaatagtagtaagttagaattttaggatttttgttcgttttttttttttttttttttttattaggtagaagagagggaaggagggggttggagaagtagttatatggatatatttagggttagatagatataggaatgttggaggagagagggatttagtgttgtattggttttggagggggttgggaagggttaggaggttggggaggggtggtgggggtcggttttagggttgtacgacgtcgttttttgcggtggttacgtatatagtgtgtatgattatagtttttttttttttttttattatttttcgtggagttttcgttaaaggttcgaggttttttataaatatagtagtttagatttagagggaggagtttagttaaagaggaggaagggtaagatatatagttagttttatttttatttaaatttagtgaaaatttttatttttttttattttttaggatttagtttttttaggtttattttttgggatttaggttttattttttttgtttttttagagagttacgaatttaaagttttattttttttatttttgatattttttgttgttagatttaggtaattttagttttagtttttttttatttttttttttgatattatagtattattaaaaaagtgatagaattatgaatatttgggggtttttggaaagttagtggatatgagtagatataagatatgttgaagggagttagaattttagggttattgcgggttaataattatttatatttggatgagcggcggtttatgtgtttattgtttatagtgttatttgtttattttatttttttttttggttttcgttttcgaagtttgatggtaaggtttcggtttttttagaaggttaaggatgagtatatttatttagtttttttttattaattttttttatttttttttagggaattttttttttttttttttttagtttaattagtattataggtatagtattagaggagttgatagaagataaaatagaataggttttttattttagatagttttttgaggaataagtattattttttgtttttatattattagtataagagaagatataatttttaatttaggaaaggttttagtaattttttaaaggaaaatataatttttgttgttttttcgtttttttttttaaattatttttggtagtattaatatatgaaaattattttttagtttttagtatttaatttttgatttttttttttttttttagattttttatttttttttttttaaaaaaataaataaaattttttttatttttaagttttagttttttttattttttatttatttattttttggtattttggtatttttagtagtaagtattattaatttattaattattaaattttttttaatttaagagtattaagtttaatgtaattttttttttttgaaggtaatttaatatgtttttggataaatattttttgtttttttatttatatttttgttttttgattttttaaaatatttttttttattttttttttttgtttttttatttttgttatttttttttatatttatttatttaataaatatttattcgaatattaatattgataatattgataagttggtttttaattatgtttttttatattatttttgatttttttttaatatttttttggttttttaatttttaatttttttttcgtttattatttatatatataattattttaagtagtaatatttatattttaattgtatttttttattataagttttttgatttgttttttgtattatttttgttattttaaatagttttaatatttttcgatttttttagttttagatatttaattttatattttttatatttttaggtttagtttttttaataatttttttaatttttgtttttttttttttagtattttttagatttttaaatagtatcgttttttcgttttttttacgggttcggttgttacggtaatcgttgttttagtgacggtttcgtttagtttagtttttgtttcggttatggttaaggtttaggatagggaggagaggaggaagggggatgagatatttttttttttttttgtcgttgaggtttaagagaagcggtatcggatttagagtggtagttaggattttttattttttttattttttttttttttgggttttcgtttttttatttttggggataatttggttaattttattttcggttcgtcgttttcgggtgtgacgtatattgtagttttttttttttttttttacggtattaaatgcgttaaagcgtaggcgtcgttggattagtttcgtcgtaacgtgatagcgcgtaggcgttgaaagaaagagaaataaatttggcggaaggggtgttattgcgggtgtgggtggaggagggagagtttggggtagtacgcgtatttatagtttagaggaagtaggaggggcgtttagatgggtattgtcgggttagacgttgtagagtgggtgtggcgagggcggagttgtgtgtattaagttgagttttgttgtagattttcgtttgttttgtttgggtaggtggatcggcgaggaagtttaaggagtaatagtaatgattttatcgtggtttatttttttttttttgtttggtttgggtttttttaaagaaaacgggaagtgggagtagttggaaatatatttaagagttaagcgatgtggttttatttttcgttttgtgtttgtaggtgtttgagtagtttagtttagtgtacgtttaacgttagttttttttagttattgtgttacgttttgaagatggaggcgcgtaagacgtttagattttgttttttagttttagtaggaaagataggtatgttgaaaattaataaaaatatgaaatattggggtattaataaatgttatgtttgatttgtaaatttgaatgtagttatatattgttaatatattcgttttttttggggtgatgagtaggatgaagtagagaaatggtcgtaaattatagtataggttattttataaaaatatatgtacgttttttagagagtaaaagaaagtggtaaaataagaattaggaaggtcgataagtaggtttttttagaagagtagtttaaaaagttgtagatgtgtgtattataggaaatggagttttgtatcgtttggatttgagggagtgttagatgaagtttgataggtaggtagtggttatatggaagaatttgtatgttttgttaagaaattaagtttaatttaattattgttatgggttagagaaaggtttaaagtagggtagaaatatgaataggtttgttttagattttaggagtgggttaggaaagttaattgttagaatagtttaaacgtatagtggggaagattgttttgtttattttttaggttgttgtgggggttaaataagatagttatgtttgagagttttgaatatatataaagggttatataattatatgataattattatagtaattttttgattattatttgagttaaggaatgcgggatttgagtatgtatttgttttttttgaaagtttttagtttaaatagaaaaaagtaagatatagtttagtatgtttagtttattaaaaaaattaaatatatatatagtaatatatatatatagagttatatatatatatataagtatagatatatagtataatttggttatttttgtggagtaggattttttgtgattttatttttttttttttttttatataagaatttattataatagatatataatttatttttgaataatatgggggtaaggggtgttgattttttgaatagttaaaaatttatatataatttttgatttttttaaaattttattgttgattagatgttttattaataatataaatcgttgattaatatatattttgtatatgtattatatatttataatatatataattttataattaagtaagttagagaaaatattattaagaaaattataaggaaaagaaaatatatttattatttattaagtagaagtggattatatttttatgttgagtaggtttaggaggaggaaaaggagggtttaaatgtgttgttattttatgggttttagaagtagaagaaaatttatatatatgtagatttaagtagtttaaatttgtgttgtttaagggttaattgtgtattgtatttattttaatattaataaaatatttatttatagtgattatttagtggtattatttagtattagattttttgttgtttaaatttatatgttaaagagatttggttaaaatttttgttaaatgttttattatttaaatttttagttttttttaatttaaatttaggaattaaatagatttaaatagtatggtaatatttataattgttttttgtttatattagttttatttttgattttatttttttgttttaatttttttttttttttttttttatataaatatatttttggaaatttatttaaattttttttggaataagatagattataagtaatatatatatgttagggttttatagaaaaatataattttaataaggaaatttaattaagggtaggagtattttaggaataatggtaatttttatatgatgatttgatttttttttgggagtaaaatattgtaattagataggatggataaggtatttaaaaatttagtattttttatttttcgaaaggagggagggattgtagagttgtttaggaaaaaggttaagagtttttttttttttggaatttatgaggaaagaaaggatttgttatatttattaaaagatgagtttttagtagtataagataagatatgtaattaaataattaaggaaggatttttatttatgatattattgaggattggtttttttaaataaatttttaattttaattttaagataattaaaaattttgggattaaaaatatatttaatgagttataattttaaagtaaagattttttaggatatagaaagtattagttgtaaaagaaaaaaaaaaggataagttgaattttataaaaatttaaaatttttgtttatttaaagagggttaagaaaataggtaagttatacgttgggaaaaaaaattttttttttatttaaaaaaaatttttttttttttggtaaaatgataattagtgataggaaaaaaatatttttaaaagatatatttgattatgaatatttttaattttttgatgagatggtaagaaagtaaaggtaatttgtatattggttaaaagttttgtaaaattagaaatttagatagggaagttaaaattaatgtttttatgaaacgtgatagtgatattatggtgttttttatattgttttgatagttattggaagtataggaaatgagggataaaatgtataaggtttgataggagatttcgtgtataaatttgggaattgtaaaaggttgtttttttttgtaaaagtgaataagaaaagaaaaaatttaattttatagaaggggaatttgattgttttagtaggtagaaagagagaaaatttttttttgagaatttttaattgtaagttagtttttatatggatttgtagtttaaatttatattatttgtttgttttaaaaaatatgaagttaagaatttatttaaagtaattttagtttgatagtgttttaaggtatttagaaaagaaatataaatgttgagaatatagtattcgtttaaggttttaaagaatttttatagtttaagttttaaaaaattcgaatttatagttaaaaattataaaataaagaaaaaaagtattatgagagagatagtagaaataaaagatagtagtattagatatataaaattcgtagatattagaattatgagatatagaatataataattatatttaatattttaaatatatatttaaagaataataaaaggaataatttaaaatatgattaaagaattgataattatttaaaaattaaggagatttgaaaagtaattaaatagaatttaaaataataataatagtaaaaaataataatatttgaaataaattgaagatagaattagtgatatggaagagggatttgaagaaattatttagaaggtggtataaagagaatagtaattgaaaatatgaaaagaaggtgagagaaatggaggatagaagagagaaatttttttttagtaattaattcgaggtttagaatgtgaggattgagaatatgggggaaagagaatattaaaagagatgatggttgataattttttaaggttgatgaaaaaaaagtttatttttagttttagaaagtttaataaattttaaatagaataaaagaaaatcgtattttgatatattatagtgattgtagaatattaaagataaaaatgaggttttaaaagtatttagaaagtttatgttttttaagttatgtgtgattaattttttttaaagaaagttattttgattgcggttgaagattgtagtataagatgttgattattaaataatatttgttttttatgttgttttttttttttttatttttttttaaatattttaaaagtaggttaggcggggtggtttatgtttgtaattttagtattttgggatgttgaggtgggtggattatttgagtttagaagtttaagattagtttgggaaatatagagaaattttatttttattaaaaatataaaaaaaaaaaaaaaaaaaaaaaaaaagttaggcgtggtggtatgtgtttgtggttttagttattttggaggttgaggtgggaggattatttgagtttaggaggcggaggttgtagtgagttaagattgtttcgttgtattttaggttaggtgatagagcgatattttgttaaaaaaaaaaaaaaaaaaaaaaaattttaaaaggtttattttattggttataaaaaggtttaaaaaagtgtaatttaaaaaaataaaaaataattataaatttttttattattagaattgtatagaaataagggatgggattaagggaaacggttatttcgtataaaaaaataaattattggatttgtttagttagtaaatagattgagtagagggaggggaaagaatatttatttgtagttggtataggtgtagaagatagtttgttttttatcggttgaacgtatttgtttggtgtggtatgttatttttttatgattatatcgagggtagcgtttgttaatttgggaagaaattggtgggttagggaggtttggttatatttttttattttttataggaattaggcgattacgttttttaaacgtcgatggtttatatttttttttttttttggaattgggtataaaattttttagagttttgtaattatttttttattttttttttatttattttatggagttagtttttgattttattagtttattataggtttttggtatttaggttttttttttatcgatataggtatggttgtttttagttggtggaatataatcgaagtttttataattttttttttaaagtttgtataggtaagtaagaattggttatggagataattagagatagttgatatcggaaatttttttttttttttggttggttaggttaggaggttttatatttttttttttagtttttatcgttagattaaatgtataatcgtttgatgttttgttttaggattttttttttaatttaatcgattttgagttttttaagttttcgattttgcgtttttcgttaggatttttgcgtataagttttttatttcgaacgttgatgttgaagttatagcgaatataggtgatcgtattttgagtttcgggtagaggtaggatcgagtcgtaatttgaatagaaatttaggttcgattgaaagttggagtaagtattggcgaggtttatgatagatatgcggtcgggtttgaggagggagttggaagtttattaataaaagagagaagagtttttgttttagaggtcgtaattattttgttttaggatttaggagtatataattcgaatttttttgttacgtacgttttttgtttttgcgattaaggagtcgaaacgttcggaatttttagatagcgtcgggtattaaaggatttggaattttttttaggggtcggtgagaggagttaattaatttcgtgggttagagcgttagttttgcgttcgcggcggggtagcgagatagagtcggttagagcgttaggttttcgcgttgacgattggttgtgacgttataattaattgcgaatcgtgtttcgggagcgttagagatggagattaacgttttttaagggagattgcgtttttatttttattttggtattgagaggttgagtataaaattggtaattaatgttgcgtttttagtagatttttttattagtatttaattttgggatatttattttttttgttttatattttataggaacgtagtcgcggggtatatttttttgaaaatcgtacgttgttaaataatgatttttttggattagagaattataatttttttgggttttgagtcggtattttttttttgcggttgtatcgtagttaaaaataaagttaagtgttttgggacgtatagttttagcgttttttgggtttcgttggcgagcgtgggttttttgtagttcgtaatcggtttcgtgttttgcggacggtttattgcgtttggaaaggggtgagtcggttttttgagggatagtaagtggtgagagtgaaggttcgaggaatgtttagttttacgggacgaaaggaagtagggatgaagtggtatatttgagaaggggtttaggattttggaggtggtggaatagaggagtttggggttttttttttttcgatttttgttagataagtgaggttagtagtagttaagaaagtttattaagtaggattttataagatttaggtcgagtttggtttttagttgtgtttgtcgtttatcgaatttttaatttattatgttattcgttaagtggatagttgatatttttttgattttttataaaatatgagaataagtatttttgggaaatttttttatttttattaatttgtaatttatattttaagtagaaattttttttgaaggggtagtttgtagttgtttattagttttttgttagtttttttattattatttattttgatagttgtgttaagtttatttatataaaagttttggagttattattgtttttttttatgaaggatataagttgtagttttttcgttgggagaggtttttatttgtttttttttgtaataatggagagaacgttatagtgaaagggttaaaatttagtaaattgttgaagagtgataagttttattatttaattgtgaaattgtttgttattttgttttataaagggagacgtgttgttgagttgattgtcgtagatagtttttatttttatttatttgtgtgttttttttgaaaatggaatttgaaattttattttttttagttttttgtttttaatttgaaaaatagttaatattttttgtgaattgtagtaaaggaataaagtattaaaaggtatattttttttttaataaaagtttatagtttaattagtaaagatttattgagtaattatgttaggttttgagttgaggttgagtttgtaaagttgaaatttgtgttttttgattttaaggaatatgaatgaataattagaatataataaaattgtgttagtaggtataaaatgtgagagtttagaatatgtatataaagtaaatatatttgtaaattttaaggaagattgggaaatggtttaataaaaatagatataatgttatggtagatatttaaaaaagatgtttagatattatgtgttaaggattattagtaattagtaaattattaattttgagaatttgggattatagattttaatgttaagtattgtgttagaagttatgtatagagaagtaaaagtaagatgattatacgtttataattttaaaataagtttacgtagataaataagaatgtttttaagaggttagtgagattaaatatttgatattagattttttttaataatatagaggtattatatttgtagatataaattatagtttttattttttatgagtttaaattttagtattaaaatgttaaaagtgatatgtgaatatagatattatagtgtaaattacgattaatttttaaatgagttgtagaattaaaatatgttaagtatttagaggaagggaagattattgatagagtagattggaaagattttataattaggagtttgatttgtgaaggatagatagatagaatttattgagaatttattaagttttttatatttaatttatatttgttttttataattttgagaggtagatttttgttttatatttttattttatagatgagaaagttgatagaagttatttgttttgagttatatatttaggaagtggtagaattagattttagatttagttttgttagattgtaaagattattttttgaattttaaatggtataaaagatatatagaggaaatgttaggtatttttagtggtttaaatacgatattatagtaaatttaggttagattagggatgatatataaaagatgatagtttttatttgtgttgttattagttttttttataaataaatttagagtaattataaattgttattttgaggggtttaatagggaatagttttataatggatttagagtgaaggatgattggtattgttagttaggtaagtagagggttgagtagttaaataatagaattttagaataaaagattagagggtagaaatgttgtatgtgttgatagagttagagagggttcggattaagaaattgtaggaagagaaaattagaaatttagaatcgtttagaaaattagaatttataatcgttttagaatataaaggaggtttgaggattgagtagattgatatagatgtatttggataatattttattaaggagtatgtttttttttatttataatttttaatacgagatttatagtggtttacgttgagtttataggaaaagtatgtttgtttatatgaaaggaaagatttttttattaaaagagtatttattattttttattataggaatgtagtggttttttatgggggaaatggttttgttgtagttttttttattagtagatttgttttgatattttttatatttgaatttattttgttttttttattttttagattggtttggggtatattatttaaagattttaggattgttgtaggttagtagtttttattggaaaaaaagattttggtaagtaaattatttttatattatatagtttggaattatatagagaaggaattttaggtttaaaatttttttgtttaagtgatatatttaggtagtatgtttatattggtaaatgttatttagttatatttatagttgtaaaataaagtattatttttggaaatttttaatattatatatttttaaatttagttattgatttgtggtggtgagtatttaatatttttagagtttttaggtttatttgggagtgatgggaataaaataataattaagttaaagtaaagagtatgtagttttttttggtgttattagggagggtgggtttggtttttgtttaaatgtgtttaaaggaaaaagatgattatattataaatttttgattttattttgatagaatttaggtggtgtgtatataatagtagtaagatagttgataatgtagaaatattaggaggagtgtgaaatattttgtagggagtaagttgttttttttgattattggtttgttaaagtagagttttattataataaaataatagtggaaatgatgaaagaagagataggtaatgaaatttagaaaaaaatggaggagaaaataatttagagcgtagaaggattaaaatagtattgtttggtatttgagagagagatgaaatatatagaaaggtatatatattaaataggaaaggttggagaatttaagaataaattatttagataagtattataattttttaatgaaataaaattattaaaaattatgttagaagggtatggtatttagaacgtatagagaagaaagtaggtaaatgagagggaatagatgtagattaaggattattaggaacgtatgattcgagggagagaatttgtagaataaagatttaaggagagaattttgagaagaagttagagttagttatttatatatgagaagtatgagagagtaaaagagataaaggagtttgaaagagttattgcgtatttttttttttaattatgtagtagaagtcggattaaagtgagtatttttatggataagttttagaatggagagaaggtgaatataattgtgaaattatattaaagaaaatttttggtaatgttattttttttaagaagttaaataggaaaaataagagattaaagttttaatgttgttatgataaaattatattttttaagtgaattttttttttttttaaatgttcgttttttttagggtttagtgaatatttttatttgtattagatatagatagatagttttgtatttgaaaattagtttaatttttttagttgatttgtatttgtttaagttgtatattttttttagtgtttagtgtttttatttttaaaatggtaataatatttgatggtatttatggaaggattgttttttttgtgaagtgtaggtatgtattagttgttttataaatgttagtttttttatttggaaagatcggggttgggtaatggtggtgaataaagaattgttttaatttattttttttattttttttgtttttagttttttaaggttattttgatgagattgttatagtttagtatatggtttttaatattatatttttattagataattattagttagtttttaaaagtgtaatttgttttgtataatttatttgaatgagaaatttaattttgagagttttttatatgttaggtattatgttagttattgaaggtgaataaagagaagtttttgtttttgaataatttttaattaatggtatagattattttataaatagataatgtagtaaataaaggttataatagaaaggtatagggtgttttataaaggacggattttaatttggtttaggtgagtagggtgaaaaggaggaaggttagggaagggagtattatagtttgttatgttttttttagttttttttgttattttttattatttatttaagtaagatttttttaatgtttggatttatttagggataattaaatttagttttttttaaatttatgtttttggtatttattgataaattagaaagtaaatttataaatttagtgagaattatagttgttaagtagaatgaaatttgtgttttttagttagtttattttttttttagatattagaaagttgggaaagtaggggtttagagttggtaagtagagaagtaaataaatggaaatagatgtttttaggaatattatgtttaagttgtgataattttgatgtttattttgttttattagtagaatattttttattttggatattgttaggttagttattgatataaatgttttgtgtttgtgttttttagtatagtagtttttgttatacgtggttgttgaggtatttaaaatgtggttggtgtagttgtggaatggaatgtttaattgaattttatttaaatttaaattgttatatgtggtaagtgattattttgttgtatagtgtagtattggataaatataatttttgtgttttagattttagttttattattagttttttgtttttgatagtgtttgttggtatgataggttattgtttattttatattattattagtttagttttttttgtattttagaggttttttaattttttaaagagatttaaaaattaatgtagattatttttgtgtgaaaataagatgattgaatttgttttgattggaattaggaattgatttttttttgttagttttggaatttggttaggatgtatattaaaattttatttttatttttttgatttgttttatggaaatttcgttgttgtgtttgttttttggttttttattgttatgttttagttttagattttatgttttgtatagaaatggattattagaatgtaataggtagaagatttagaagtgtaaattagtagggtaatgataagttttttgagttgagtgggattgaaaagtaatttaatatataatttattagtaattgtttattatgaaggtttttagtgttggatatataaattgttgagtttaattgtttttttttttttttaaatttagtataaaagtaattggtgtttttagggtaattttatatttaatacggttaagaataaaagtttatgttttaggaatttagtttgtttaaatttgtatttattatttattttaaattatatttatttttttatttttttgtattgtgtttgtttaaattttgagttatatttaatgtttttttttttggttttttttttttttaatgtgaaatagaatatataatatataaatgaaaatgtatatttagaagaataataataaatgtttaggtgttcgttgtttagattgagaaatggaatattattatattttaggagtttcgtatgtttttatttatattttttttttttgtagttagaggtaattattattttgaattttgtataattgttatttagtttttatagattttattgtttgtgtatttttaatagttgtttatttatagtttttatataaatagaattatattgtatatgattgattatttttgtttattattatttttggatttatttatgttgatgtgtgatattgtagtttatttttatgatatgaatatgttataatttaattatatattttgttgatgttatttagttgtttttagtttttgttttattttttttttaaaaatgatatttagataaatattaatatgtttaattttatgttttggtgattgtgtattagatatatgtatgatatataaattgtggtatatttatttgataggtttgattttgaagtttgttagatttttgtttttttgtggtattatgtttgtaagtttgttttgtagagtttggtatatgttagttttttaatagatatttgttgaaagaaaggatatttgttaattgttggagataggtttaaaatatataaatagttgataatagattattttagttttttatttattttgtttaggtataattatagttaatttttgtttatgtttatattttagttgaggtattaaaatatttgtttatttagttggtttttagtgagtttttagtataggatttgtttttttttttgttattttttttaaaatttttattttattgttttttagaaaagattatttatatgtcgtttttttaaggtatttgtagtacgaaagttttatttttgaataaaagggtttttagagaaggagataaggagtttttttttagtacgaggttgttggagtttttagagggttaaaggttgtgtaataatagtttttttttgtttgttggataaaagtttttgagtttttaagtattttgtgatttagttttgatagagtattgagtttggaaatggtagagtggggatttaaaataaattttttaattttaaatttagttttatttatttttttaaataagattaaaaaatgttaatgtttgttgatttgtgtgtgttgaattatttttgtatttttgggatgaattttaattaattgtggtatatttttgatatgttgttggatttagtttgttaaaattttgtttaggatttttgtgtatatttttattaggaagattggtttgtaattttttttttttttgtatttttttttgtttttggtattagggtaatgtaggttttataaaatgagttaagaataatttttttttttttagttttttttaaatattttgagaagtattggtattaatttttttttgtatgtatggtagaatttgataggaaagttatttggttttgggtttttttttattgagatatttttaattattgatttagttttattatttattgttggtttgtttaagttttttatttgtttttggtgaaatgtttataaaaattataaaaattagttgggtgtggtggtatgtgtatgtagttttagttatttagggggttgaggtaggaggatcgtttgaattttaggaggttaaggttgtagtgagttggtattgcgttattgtgttgtagtttgggtgataaagtgagattttattttaaaaataaaaaaaatttatatggaattataaaagagttttatttaatagttaagttatagtaatagttttgtaattgttatagtagaaattaaattattatggtatcggtttaaaatagatatatagattaatggaaagaatagagaatttagaaataattttatatatttatagttaattgatttttaataaaggtattaagaaaggatattttttttaataaatggtgttgggaaaattggatatttatatgtagaagattgtagttaggtttatattttttattatattaaaaaattaattaaaaatggattaaaggtttaaatgatagattcgaaattatgaaattattaaaagagaatataggggaaatgtttaagaatattggtttaggtaaagattttatggttaagatattaaaagtataggtaataataataaaaaataggtaggtgggattatattaaattaaaaatttgtatagtaaagaaaataatagagtgaagagattaattgtagatgggaataatatttttaaattatttaataggggattaatatttagagtgtataaggaatataatttaatagtaaaaaaaaaaaaaaaaaaaaaaaaaaaaaaaatttttttaaaaatggttaagggatttgaatagaaattttttaagaaatataaatggttaatatgtatgtgaaaaagatgtttaatattattaattattagggaaatttaaagtaaattataataatatattattttattttagttagaatagttattattaaaaagataaaaatggtagttaggatataaagataaatttttatatacggttggtgggaaggtgaattagtatagttattatggaaaatagtatggagattttttagaaaattgaaaatagatttgtgtgatttagtaatattattattgggtatttatttaaaggtaaggaaatcgatatattaaagggatattggtatttttatgtttattgtggtattatttataatagtaaagatagggaattaatttaattgtttattaatggatgaatggattaaaaagatacggtatatatatataatggaatattatttagttataaaaagaatggaattttgttatttttattaatatggatagaattggaggttttgatattaaatgaaataagttaggtatagaaagataaatattgtatgtttttatttatgtgcgagttttaaaaggttgatttaatcgaggtaaatagtagaaagatagtatttagaggttgggaagggtgtgtgtgtgtgtgtgtgtgtgtgtgtttgtgggtgtgtgaggggggtgatgaagagaggtaggttaatgggtacgaacgtatagttagatagaaggaataagttttagtgtttgatagtatagtagggtgattataattaataataatatattgtgtattttaaaatagttagaagatttgtaatgtttttaatatagagaaataaatgtttgaggtgacggatattttatgtattttaattttattattagatattatgtgtgtattaaaatattatatgtattttataaatatgtgtaaatattatgtataaataaaaagttatattgtataatttttatttgttaattatattttaataaatttggaaaaaaataaagtatgtatgtaattaaagttttaaagtatatttttaaatatgtgtaattattattgtatttaattttagaatattattatcgtttgaaaaagaaattttatgttttatagttattatttttttatttttttttttttattattttaaattttaagtaagagttaatttatgttttatttgtatggatttgtttattttggaaaatttatatgtaaatataattatatatggttttttgtgattagttttttttatttaatgtttttaagtgttatttatattatagtatgtattagtattttattgttttttatggttaaataatattgtattttatagatgtattatatttgtttatttatcggtttatagatatttggattgtttttgttttttggttaatataaataatgtatttatgaatgtttatttataaatttttgtgtgatatatttttattttttttggatatatatttaagaatgggtgagtcgtatggtatttttatttttaattagttgagttatagtttgattttttttaaagtgattatataattatatatttttgttagtagtgtttgagggtttttatttttgtatatttttaataatatttattatttgatgttttgattttagttattttttggttgggaagtggtatttcgtgtgtgtgtgtgtgtgtgtgtgcgcgcgcgtgcgtgtgtgtgttttagatagagtttcgttttgttgtttaggttggagtgtagtggtgtggtttcggtttattgtaatttttgttttttaggtttaagtaatttttttgttttagttttttaagtagttgggattataggtatttgttattatgtttagttaattttttttatttttagtagagatggggttttattatgttggttaggttggtttggaatttttgattttgcgatttatttattttggttttttaaagtgttggaattataggtgtgagttattatgtttagtttttattgtggttttaaattgtatttttttaataatgtcgattattttttttatgaatttattggttatttgtatattttttttagggaaatgattgtttatattttttgtttattttatttttatttatttatttagagacggagttttgttttgttatttaggttggagtggagtggtgcgattttggtttattgtaattttcgttttttgggtttaagcgatttttgtgttttagttttttaagtagttgggattataggtgtgtgttattatatttagttaatttttgtatttttagtggaggtagggttttattatgttggtgaggttgatttcgaatttttgattttaagtgatttatttattttagttttttaaagtgttgagattataggcgtgagttattgcgttcggatttttttgtttattttaaaattgggattatgtgtgttttgtaattaagttgtaggagattgttatatattttagaaatattttttgttaaatgtatgatttgtaaattttttttttttttttgtgggttttttttatttttaaaaaaatttttaatttttaaaattattttaattttttgatttaaatgtttattgttaattagtaaataatatatatatggggtataatgtgatgttttgatatatgtatatattgtggattatttttttgatagtgttttttgaagtataaatattttaattttgatgatatttaattttttttaatattatttaatattttttgtttgtgttttggtataatatttaagaatttattgtttaatttgagtttataaatatatatatatatatatatatatatatatatttgagacggagttttattttgttgtttaggttggagtggagtggtgtgatttcggtttattgtaatttttgttttttgggtttaagttatttttttgttttagttttttgagtagttgggattataggtgtgtattattatattcggttaatttttatatttttagtagagacggagttttattatgttggttaggttggttttaaatttttgattttgtgatttatttgtttcggttttttaaagtgttgggattataggtatgagttatcgtattcggttagtttataaagatttattatttaggtttttttttaagaattttgtaattttattattaatatttagattttttttttattttgagtttatttttgtatatagtgtgaagtaaaggtttgtattagttttttagattttgtgtaatatattgttaagatttgatggtttaaaatagtaaatatgtattttgttatagttttggaggttagaagtttgaaatttaggtgttggtaggattagttttttttggaggttttgggggaaagtttattttatgatttttttttaatttttggtagttgttggtagttgttgttttattggtttggagatatattattgaaatttttgtttttatttttatatggtatttttgtttgtgttttttttttgtttatgttatattttttttttttttattaagatattagttattagatttaggttttattttaaatttaggatgatttttttttgggaatttgaatttaattttatatataaagatattatttttaaataagtttacgtttataggtattggtggttaggttttagataaatttttcggagtatatattttaattattataaggtttattttattattttgtatgtggttattaagtttttttagtattatttgttgaaaagattgtgttttttttcgttgaatgtgtttagtatttttgttgaaaattagttgatagtagatatatggttttatttttgaattttagttttattttattgatttatgtttattttatgtaagtattatattgttttgattattattattttatgcgatgttttgaaattggaaagaatgagttttattttgttttttttttttttttattttttagagatagttttttattttgtaatttatattgtagtgtagtggtataattatggtttattgtagttttaattttttaggttaaagtaatttttttgttttagttttttaagtagttgggatgataggtgtgtattattatgtttcgttaatttttattttttgtagagataggattttgttgtgttgtttaggttggttttgaatttttggttttaagtaatttttttgtttcggttttttaaagtgttgcgattgattataggtatgagttattgtgtttggttttttgtttttttttttaagattgtttgcgtagtttgcgtttttttaatttttttataaatttataattagtttgtaaatttttacgaagaagttatttaggaatttgatagggattgtgttgaatttattagtttggaaatataattattgagttatattaaatttaatttatgaattttattttatttatttagatttttaattttttttattgatgtttgagttgtattttttttgttaaatttgtttttaagtattttgtttttttaaagttattataaatggaattgtttttttaattttatttttggatttgttattgtaagggtttagaaatataattgatttttgtatattggtgttatattttttatttttgttgaagttagtagttttaatagttttttaatggattatttagtatttttttatataaaagattatgttatttgtgaatatagttttatttttttttttttaatttgaatatattttattgttttttttttgtttaattattttagttagaatttttggtaatgttgaatagatatagtgggagtggatatttttgttttaattgttgattttaggaggaaagcgattagttttttattattaaatattgatgtggtttggatttgtgtattcgtttaaattttatgttaaattgtagtttttagtgttggaggaagggtgtggtgggaggtgattgggttatgggggtggattttttttttgttgtttttatgatagtgaattttcgttgagattttgtagtgagatttggttttttaaatatgtgtgttatttttttttttttttttttttttgttttagttatgtaagatgtattaattttttatttattttttattattattgtgttttttgaggtttttttaggagtagaaatttgtatagtttgtagaatttttagttaattaaattttttttttttataaattatttagttttatgtatttttttaaagtaatgtataaatggattaatacgagtatgatgttagttgtagtttttttatagatgttttttattcggttgagaaagttttttttaatttttagtttgttgatttttttttttttaaagtaatatggttttaatatatcgtttaagatgttttcgaatttttggttttaagtgattttttttttttagtttttttgagtagttgggattatagatatatgttaatgtgtttatttgttgattgtttttattatgaaagagtatcgaatttgattaaaatttttttttgtatttattgagataattgtgggtttttattttattgatataatatattatattaattgatttttggatattaaatttattttgtatttttaggataaattttattttgttatggtgtataattatttttgtatattgttgggttgtttgttagtatttttttgaagatttttatatttatatttatgaatagcgatttgtagtttttttgtgattgttttgtttgtttttggtattagttttatagaatatattttatagaatatgttgggtagtgttttttttttttttttgggagagtttgtgaagaaatggtttgatattagttatttatagattagagtttgagtagtatggtgataaatttaggataattttttagatttttatggatgttttagattgatgtttgtgtttttaattttttatttaaatttttatgtttaaaatttaatttttagtgtgatgatatttagaggtggggttttttggaggtgattaggttatgaatgtagagtttttatgaatgggattattgtttttattagaaagattttaggtagttttttttatttttttgttatgtgaggttatttggagaagatatacgtttatgaaataggaaaggggtttttattagatatgaaattaattaatattttgtttttggatttattagtttttataattgtgagaaatatttttatgttgtttataagttatttagtttaaggtattttgttatagtagtttgagtggattaagatagtgggggtgtgtggtgttatagattggtttttggttatagtttttggtttttagtttttatatttttttgtttcggttttttgtaataatattgggtgtgttcggtttcggtaggttttaggaattagaattttttttttggttttattttatttgttttaaggtaggattttaattttttgtttttttgattatgggttttaagattttttttggagagggttttatattatatattgggagaaggaatgttggtgttacgaagtttttataaaaatttaggagaattgggtttagggagtttttaggtagttgaataagtggaggtttttggaggttggtgtgtttaggaagggtatggaagttttatgttttttttttgatattttattttatacgtatttttatttgtattttttgtaatattttttataataaattagtaaatataaatgtttttttgaattttgtgagttattttagtaaattagtgaagtttagagtgggtggtgggaatttttgcgattggtgtttgatgtggagtagttttggggattaagtttttaatttgtgggatatgatgttatttttaggtagatagtgttgatattgaattggaggatatttagttggtgtttattgtttggtgtgtggggaaaaatttttatatttttggttatagaagttttttgtgttgatgattgttgtggtatgagagtagagggaaaatgtggtttgagagagggttttttaaaatagggttataaaaatataaatgttatagatattttttttagaaaatatgtgtatatataaagaaatataaatattagtataaaattttagtgtatatataggttttttgaagttttagatatttagattttaaaaaattttaataagagataagttttgagtaattattttattattttatagtgttattttatttatttgagtataaattgattaggaaaaagttgtattttataatagattattaaggaaataaattgaaagttgtaattaattagttattgatttatttagtaaaatttaagtgtttatgatatattagataaggttttagttttagattattgttttaggaattgatttttttttttattttttttttattttatttttttgtgttttagtatttgaattttttttatgttagggagaattttatatttaaagagtatgattttatatttaaagaattttatatttaaagagttattgtaggaagtagatattaattttttttacgaaagaaaaatttatttttttaaatattttggtagttggatatgggatgaggtttaggttttattaggtagataattatttgttggattttgatttagtttggtgatataagttggtattgtgtatatattttagtaagtgtggtgtgagttgtagtagtaatgtttagttgttaggagtagtcgtgatagtagttttatttgtaaggtttagtgtttagttttagagtgttattggtatgaatagtgatatttgtgtttagtattaggggtagtgatttttatgtgagattttatttaggatgggattatagatgttgtttttagttatgtagttttaagtttatttttatagatttttttaaaataaaataaatattagtttaatgaagatagatgatagatagatagatagatagaagttttttatgtttaaattagaaaaaatagtatttaaatgtggatttaagatttttttttattttaggtattgttgattattgattttagtggtttttaatttggttgattattaggattttttgtagattttttataaaaatatttaggtttttttttatatttattattttagaagtggaatatggattttaggaataataagttataggtgaggttgatgtatagttatttgggaattttggtttatatttttgttattaaaagcgtgatttgaagattattagtgtttgttttaatttttttataaatatagaattttatttttaattttagattatttgaattttagaaagttgtttaggtgatttttacgtatattaaaatttgagatttttagatttatttattttttagatgtggtgttagaattgtgtagtttgttgttagagtgtgttttgatgaaattttttagtattgaaggtttagggtttagtttatgtttttttttttttttatagttattttttttttggcgatttatgtatgttttatgttttaaatattattaatatggtattaatttttaaatttatttttttagtttagatattttttttgtatttttaatttgtatatttatttgttaatataataattttatttgaatgtttgatatttgagatttaatattttttaaattgaatgtttatagtgttttttttttaaatatgttttttttagaattttttttatttgtgttgataataattttatttttttatttgtatagtttgaaattttggggtttttttttgattttttttttttatattttagatttaatttattaggaagtattgtgaagtttatattgagaatgtgtttgaaatttaattattttttatttttttttttgtttatattttaggtaaagtaattagagttgttaatttgaaatattgtattagttttttatagtttttttatttttttatttattttttattttttaattttgtttttagtatagtagttaggatgatttttttaaaagatgtgttaagtttttattttgttgatagttgtttgtgttttttttattttatttagagtaaagttagaatttttttagtatttttaagtttatatgatttttttaaatttttgattttatattaatgattgttgtagttatttgagtttttttaattttttttataatttagatgtgtttttgttttggtgtttttgtattgggggtttttttgtttggaaagaatttgttttagacgtttttatagataatttatttttttttttaaggttatatttttagtgagattatagattattttagtaaaatagttattttttttgtttttatatatttataatttggattatttgttttatattttttagtattttttgatagaaatattttttttatttattttgtttatagtatatagtttgtgtttttttattaaaatatgtgttttttaaggttagtaatttttgtttgtttttagtttttagatgtaaaattagtattttatatagttagtatttaataaatattggttaaatgaatgattagtgtatagtatttttttattttagaaatagtatttttattaatgtagttgtagattatatgttgttttgtggtagttatagtgaaataattatttatgttgatattaatgttgtttgtattttttttataaatgttgttttcgttttttttttatattaatttttatatattatagtagataattatagttttttttttagaaaaaaaaaaatgattttaggtttatggattttattttttaattaattgtgaattaaattagagtttagatatttatgagtttggatttgagttagtattaggattattatagttaaaggtagggagagagggtaggtgagttaaaaataaatttttgttagaaatttaataggagtttatttaaggtgagaaatcgagatatgatttttaattttagaatttgattttttgaaaaagattggggaaaagatgcgaagaatagtttaggaaatagttttggaaggataagagttgggtgggtttaaaaattggttttttgatattatagagatttttgtgtgtaggggttattttagggtttgtgaggataatgatagaaaaagtaatttttacggttgttttagaggagattggagatttggagattagaatttagatataagaagaagaataggtatagttttttgttaaaataaaataatgaataagatgggggttgagggttagatttaagtttgagtttaggttgatttggttatataaagtttttgttatagttttagagataggataaggtttggtttttttttttttatattaaatgttttttgttatatatttttttttaatttagagttaggagttacgttatcgttttttaaacgttttggttttaggatttttgtatgtttttaggaattagtgaggattttgaagataattttatgtgagttatatacgttaatatttattatattagaaattaaaattatttaaattattttatttatttagaatattaataatgtattgtatgttagaaatatttttatgtaaagttagtattttttaaagtaaatagtatagtgagaagagtgtatttttttatattttgtatgtttgtaaattttttttttatgtgttttattagaagattaatgaattttttttttttttatttaatttgttattttggttaatttgttatgtttggttgaagtgtatgaaaaaaaatttatttttatataatgatatttttgttgttgtttttgttttgggttttgttggggggttttgtttgtttgtttgttttttttggttttatgttattatttaggtttgagtgtagtggtgtgattatagtatacggtagtttcgaatttttgggtttaagtgatttttttaatttagttttatgagtagttgtgattataggtacgaaatattatcgtagttaattttgtttattttttgtagagatgggggttttattcgaatttttgggtggaatttttaggtttaaatgatttttttgttttggttttttaaaatgttgggattataggtataagttatttcgttaggttaggaatgtttttaataatatttttagaaaattggatatttatttttgatattatattaaaatgatagaagtgttagttttttaaaggttatttgtaatgtggaatatgaaattattaataattattttatatgttgttatattaaaatatataggttcgatttttatattgaatgttttttgtataatatatgatttttaaaaaaagaaatataattttattatattatgttttttagtgttgatatatttaattataagttattaaaaaattatattttttaatattattatagatattattagaaaagattgttaagtattgggaagttattaggtttatgatggtggatataagttttttaggattttaatttttttttgagagtttgttttttattattgggaataatattattagttgattatgtggaagggatagggttatgttcgtttttgagaaagtgttagttaaatatttaagtttaaatgataattatttttgttatttatttttttaagtaaaaaggatattttataaaaaatagattagtataatttataaaatgattttgtggatataaatattttaatttgtttttgttttcgttttaagatagggtttcgttttgttatttaggttggagtgtagtggtatgattttggtttattgaaatttttatttttcgggtttaagtgattgttgtgatttagtttttttagtagttgggattataggtgcgtattattatgtttggttaattttgtatttttagtagagatagggttttattatgttggttaagttggttttgaatttttgattttaaatgatttatttgtttaggttttttatagtgttagaattaattgtaggtgggagttattgcgtttggttttaaatattttaatttggaatgtagtagaaatattttatgcgtattttttatttatttatttaagatatattaaattgtggattttgggatagagatttaataaagttaataattttttgatattttaattacgatatatttaagtgaaatttgtttttttttttataattaagaagtggttaagaatataataattattattttagtttggtattatagtttttttttttgttaagttttattttagtataaataatgtttttattgtattataaaaatatttttaattttgtggatttatgaaggggttttagtagtttataagggttttatagattgtattttgagaaattttgttttgggtaagttgtggagagtttttgattggtttttttgtttttttatttttttaaattttttttttcgagtaggattttttgtattttaaaatttagttagcgttaagtttgttttgttttgggtttttatagaagagaatttattatttgtaaattggatgtagagagtgtttttagtttgggaatagaggtggtaaatgtgtttttattttggagttgggaatggtttgcgtttaaaagtataaaatagagattttatttttgatttattttgaatttgtaatttttatgagaaataatattggtttttttatttttgttttttttaagatggggttttatagtgttatttaagttagagtgtagtggtatgataatggtttattgtagtggcgaattttcggggggtttaagttatttttttattttagatttttaagttgttggaattataggtatttgttagtatgtttagttaattttaaaaattatatattttgtagagttaattttaaaaaatattttgtagagatgggattttgttatgttttttaggttggttttaaatttttgagtttaagcgatttttttgttttggttttttaaagtgttgggattataggcgtaagttattataattagttatttttttattttagatgtgtttaatgtatttgatttgaggtttatatagtattaagagtagttattttaatttattaggttgttataataaaaatattttagattaggtggtttataaataaaagaaagatattttttatagtgttggaggttgggaggtttaatattaaggtgttagttaattttgtgtttggtgagggtttgtttttttatagttgtttttttattgtatttttttatggtagaagggttaaaatagttttttagaattttttttataagggtataagtttaatttatgggagttttgattttatgatataattattttttttaaaataaatttatttttaaatattattttattggggattaggttttattttgggaggagtataaaaatttttatagtagtagtgttgtttaatagaatattttgtgatgatgaaattgatttatatttgtattgtttaatatgggagttattagttatatgtggttattgagtatttggaatgtggttagtgtgataaagagttgattttttaaaagttttatttaattaattgaaatataaatagttatgtgtagttagtagttattatttttgatagtgtttatttagagtgtttttagtttttaattttttttataaaaaaagatattttgtgatttttagattgaaatatattaaaattatttttatatagaatttatggatttggttatgtgggttttagatatatttttaaaatatagtaggtttaagaaagtttaatatgtattttaataattagagtgtacgtatagattattaaaatatgatttattaatttaaggttatatatttttaaaaatgtttattattagagttaatttttgttaatattttattgagatttttggtgttattgttttttataatttggtgaatataaggaggtatataagttattatttagtttaagagaaagtatttattgaagttgttatataaaatattttataggttttgtagatatattttaaaattataagtaaatgatttaaatttttttatttttgagatagagttttattttgttatttaggttggattgtagttgggtaattatggtttattgtaattttcgttttttaggtttaggtgatttttttattttagttttttaagtagttgggtttataggtatatattattatatttggttagtttttgtattttttggtgaatatattatgttggttaggttggttttgaatttttgatttcgagtgatttgtttattttgttttttaaaagtgttaggattataggcgtgagttattatatttgattaggttttaaatgttaaaattttattttagaattttttgttttttgtttattttttttagttttttttttaaattaaatatatttgtgtgtttttttttattttgggatttttttttttttatattatttgtatttagatgaaaatagatgttaagttttataattgtgaggtagaaaaggattttgtaagtatgatttaaatatgaaaagttataaataaaaaaataaaatttttttatgttaattatagatttataaatatataaatatatgtttgtgattaaatttaaagatatataaataattggaaagataaaaggtagtatattttaatgttttttagttaaagattattaggaatatttatagttgaataattggggtttattatttattgttataagagagaatgtatattattttagcgtgaggatattagaaaaaatgtaatataggatttggttttttagtggatgtttttggggagagttaatgaggtaggggttgattgtagatggggtgttgttaaaaagtaggaatatttttacgattgttttaataaattttatttataataaatgtagagtagagtaaggataaagttgtggttggtaaagaaatagtcgttatttatattagttagtagggggagaggtttggtattttgtgaggtatatagtgttttggtttttgtttgtgtttatattaaattatgtagtgtttttgttttgttttgttttattatgtttttagagtgtttttgtttgatgttgtgtaatatggtttatgtttaagaaaagaataatatggtttagtgttgagtagtaggatagtttttaatagtattgaaatttattgttagtgttagaagttaagagttgtttttttttttagttaaatttaatatttttaagttattttaatagaaaaataataatattagaaagtaatatgggaaagaataaattaaatattagataatatattttgattaatgaatatgaggaaaaatgagaatatgatattagaaatgcgaatgaaaattaaaatttgttagtttggtatatgtgaaagtaaatgataagtatattatttagaggtagggaaaatatattgttatgaaggttgatgaaaaacgggtatattttgggaggtcgaggtaggtggattacgaggttaggagattaagattattttggttaatacggtgaaattcgtttttattaaaaatattaaaaaaaaattagttgggcgtggtggtaggcgtttgtagttttagttatttgggaggttgaggtaggagaatggtgtgaatttaggaggcggagtttatagtgagtcgagatcgtgttatcgtattttagtttgggaaatagagtaagattttgttttaaaaataaaataaaataaaataataataaaaaattttggggtataaatttttagaggggatttttgcgaaatatgttaataatataaatggatttatattttaatgtatatattttttttttaagaattttttttaagaagataattgtatatattttaaaaaatatatgtttaaggatgttttttgaattttggtttataaaagtaaaatgattgaaataatttaaatgttgtaattaatatagggatagtagttatgagtagtagaatatttaatatattttaaggtataatattatgtgttttattgagagagttaaatttgatttttaatgtaaatttatgagaagttcgatatgtgatatttttgtatagatagggaaagggagatttagagaggttaagtaggtggtgggggtggagtggatttagggaatttttttttaatggaattattttttattgattttttgtttatttggtggtggatatgacgttgtattttatgttagtgaatttttttaatgtttttgaatgttttatgataggaggttatgagatatagtgtttaggagaatattaaggggtaattgattaaggaagtttgatttttttgtttaattatatttatatttttttatttagtatgtattttaagttttttgatgaattatgtgatttattagattttgaagatatagtgaagagtaaaagtaagatgttggtaatttgatgtttgtattgttatgaaggagatgtatatttagtagaatttataaagagaaatataaaattattgttgagttaagtgtggtgaagaaaagtttatggtattatgaaagtagataattaggagatttaataggtttattattattatttttaataatatttaaaagaaataataagatatggtatttataaatgatgaataggattttataaaattatatataattagagaattaaaaagtatttttggaaattaaaaagtgattatttaaataagtattttaatagattatttggaagagtaaatttgtattattattaaatattaaaaatggaaaaataatgttaagaaagatagaaaaattatacgaatattaggttattagttaaggattttttgtaatttaataatataaattttaaaagaatggaaagatagaaattatttaaaataaaaaaatttttttaagtttatagataaaaatttaatttgtaatggttttaattaagtttttattatagtagatgaaaatagatttatattaagatatattataatgaaattttagaaggtgggtggaaaagaagaaattttaaaaatattaaaaggtaagaaaaataatattagaagttaaaaaatgttgatggaatgttatggaaatttttaggaaaaatgtttttaatatagaattttatattaagtttaggttggaataagtgttagggtagttcgaagatatttttagaagtttaggtttttagattttattttttatgtttttttaggaatacggatgaaatgagaaataaaaacgatggagaaaattaaaaaaggggatatatgggatttaggtaataggagagttagtataagagagaggtagagggatgtttaggatgaggtgaagacgattttggaaattagtttagatgtgtatgtattagtttacgtgtggtaggattaagggaagtgtttttataaagatgaggttggtagaatacggggtatggttgaatatatttatggagattgttttagtttatttatgttgttataatagaatgttatagtttgggttagttatgaagaatagaaatttgtttttttagttgtgaggttaggaatttaagattaagttattagtatttggtaagagtttttttgttgtgtttttatatggtaagtgggttaagggtaagagagaggataatattattattatgggtttatttttataataatgatattaatttgtttatgagggttttgcgtttatgatttagatagtttttattaggttttattttttaatattattgtattggggattaagtttttaatatatgaattttggggaatatatttaaattatagtagaggttttggagggaaatttggaagagattttataatgagtataatagaaattaagtatatgaagggataaaatatttattaattttagggaaattaaaaagttaattttaggaaggaaaataatttttgtgaatagtattttttaatttaattgtgaatagtattttttaatttaattgtgaatagtattttttagtttagttgtgaatagtatttttgtggttataataatataaatagtgagtatttagttaattaaaattataaaataattatattgagaggagaggggtatatgaaagggagttatatattaaggatgatatataagagtgaaaaataaaacggtattataatatattatttggaggtatagatgtaacgattaaaaaattaggtagaataaagtagattgtttttaggatttaggaaatggtgtatatgaaagattggggatatttgtgtttataataagttttgtagaagtatttggtttttgaaatattgtttataaatttatttgatatattaaaaatattatgagataattgattaaggaattattttataaggagtgttagagaaatggggcggtaattggagggagatatggaattaggtaatggatttatttattttatttttaattgttttgtttttatttaaattgtatgttttattttttttaattttagtaatagtatagaagttttattatatttattttaaattggtttcgagtaggttaaggttattgggatttttgtcggaatattgatataaagagtttttaaatatcgggtataaatgtgtttgtaaatagatggaagtaaatagtgtattggtttaaatgttttatgagttagtttgattttgtaatgtaatttttatttttgaaacggttagtttggagggggaaggggtagcgtgagggagtgaagttgaaattgttttttattagtttatttttttattattaaatagagattaagagagaaatggttttaatattttattatatatatttttttttatgtagtttaagttgagaatgttatgtaaatgggttattgtaaaatgtagtaatttaatttttttttaattaaaataagaaagtagtacgattttatttttattaatttttgaaggtttatagtagttaaagtatttttgtttatttgtataaaggttaaaaaaattattttttaaataaaatataagagtagttaattttattatcgagtaaaagtaaaaattgggatttttttttaaattagtttaaagtggtatttaggaatttagttgtaggttgttacgttgatatcgtgataaattaaagtgtagggttgggtttggttttgtttttgttttttttttaatatttagtgtttatggattaagttttggaaatgttttaattgtaaggtagggatttgtttggattttattatgagtatgttttttgggttggatgttggagagtgaggtatgttttgtcggatttatgtcgattatttagtagttattaaggtaaaaaaatttatcgttttttttttggtattttattttttggaaatttatttggtattataagagatttttaattttattaaatttttttataaattgagattttttttgtgatttatatgtgataatttttaatgtagtttcgatttttttatagttgttagtaaattattttaataggggtatgtttttgataagcgtatgtttttgtttggtttttttgtttgtgaaatgagatttattttttttttgttttggagttagagaattttttttttttttgtgttttggtaatgaagaatatattttattatatttagatttttataggttattagaatttttatagtttttatttttaaagtttttagtgtatttttaatattaaaatagtatttgtttgtgttttggttgattttattaatgtatttttattaatttttttttttgaataaattttattttggagaggattttagtagatagtttaatagtttggttgaatttatttttattattataggatatattaattaattttttttttttgagattgagttttgtcgtgttgtttaggcgggagtgtagtggtgtgatttgggttcgttgtaagttcgttttttaggtttacgttatttttttgttttagttttttaagtagttgggattataggtattcgttattacgtttagttaattttgtttttgtatttttagtagatatagggttttatcgtgttagttaggatggtttcgattttttgatttcgtgattcgttcgttttggttttttaaagtgttgggattataggtatgagttattacgttcggtttattaattaattttaaaattttcgattgtaatcgttgattaaacgtattagattgatttagtttagttttaaagttagcggatttagttaaaattagattagttattttttttttgtttttagaaataaatagttgtatagtagtttttgttattttttgaatattgttaggttatttttttatttttaaataggtaaaacgtaaggttgattgatttttatcgtgtttttttgggagatttatagtgagtttttgtaggattttttttgtgtttttttggagggtgttaaaaagtgtattattattatttattacgatgaatttagatttgtttttatttgaaagtagtgttgtaagagtttttgtatggaatttgttgttatataaatataatgatgtattaattggtttgaaatgtttaaaattaatgttaatttttttgtgtatatttataagtagataggtaaaatgaaggaaaatttagaattgaaatggttattatttttaaaaattagtaattatagagttaatatgtagaagttttttttttttttttttttttttttttgtttattttgaatatgatgatatttttataggtgttgagataaaatttattgtttatggtattttagttaaggaaagaaaatagttttaaaggttttgaaattaatggttttatagattataatagttttatggtaattaattatttagatattttttttttttttttttgagatggggttttattttgttttttaggttagagtatagtggtttgatttgggtttattgtaagcgtcgtttttcgggtttacgttatttttttgttttagttttttgagtagttgggattataggtgttcgttattatattcggttaattttttgtatttttgatagagacggggttttatcgtgttagttaggatggttttaattttttgattttgtgatttgtttgtttcggttttttaaagtgttgggattataggcgtgaattatcgtatttggttgatattttttataaatataaatttaggtttttttaataattgtgtataataatgaaatatttaattgaaaaattagtaatataaaagaaaaaaaaataaatgtttataaaagttaggtttttagattaaataggttaaaattttgattttagagtaataatagaaggtatttttgtttaatagaaaaattttgttttttgtgttatgtaaaagttaaaaagaaaaaggtgaagaaaaaaaaatagttaaaatttttttttttttatatttgttaattaagtaaataagattggtaaataaaagattgatttgttattaatttaaggttatttggagatattttgtttatataatttagttaaaaagaaatttataatttatttgaaataataataataaaaaaggtgggggtaatgaaagaagtttttttttttttttttttttttttttttttttttttttttgagacggagtttcgttttgtcgtttaggtcgtattgcggattgtagtggcgtaatttcggtttattgtaagtttcgtttttcgggtttacgttatttttttgttttagtttttcgagtagttgggattataggcgttcgttatcgcgttcggttaattttttgtatttttagtagagacggggttttattttgttagttaggatggtttcgattttttgattttatgatttattcgtttcggttttttaaagtgttgggattataggcgtgagttatcgcgttcggttcgaaagaagtttttttaaaaaatttaattgttacggaaagtgttttatttaaaattttggtttatagtttttattagattataaaggtaattgaagtttaatttggatatataaaatatattaagaatgaattaagaagaaattaaaaatttgagtatattaataatgagtaatgagtttgaattaggaataaaaagttttttaataaagaaaagtttagtattggatgtttttattgtttagttttattaaatatttaaagagagattgatattaatttatttgaaattattttaaaaaattgaagggggaaggagtttttttaaatttattttaggaagtaagtattattttgttattaaaattagggaaggatataataataaaaaattatacgttgataaatatagatgtaaaaattaataaaatagtagtaaattaaatttataatatattaaaaagattatatgttatgattaaatgggatttgttttagggatgtaagaatggttatatatttgtaaattaataaacgtgatagattatattaatagaatgaaggataaaaataaaatgattatttttagatgtagaaaaagtatttggtaaaatttaatattattttatgattaaaaatttttaattaattaggtatagatgaaatgtatttaaatataataaaggttgtatatgataattcgatagttgataatatatataatggaaaaaaagttgaaagatttttttttaagaattggaataagataaggatgtttgtttttattaaatttaatatagtattagattgatttttatggaaatggatagaaaattttaaaagattatagtaatgataataataaaaatatatagtattggttcgatttagagtaattaggtaagagaaggaaataaaaggtatttaaattggaaaagaggaagttaaattgttgttgtttgtagatgatataattttatttatatataaatttaaagattttattaaaaaatttttagaattgataaataaatttagtaaatttatagaatataaaattaatataaaaaaattgtagattttttatataaattaataaatatgatagagtatattagtggaatgaaagataaaattaatattattatttttatagttgtagaaaaagtatttgataaaatttaatattattttatgataaaaatttttaattaattaggtatagatggaatgtatttaaatataataaaggttatagaggtaaatttaaaatgatgaaaaattaagaaagaaattttatttatagtaattataaaaaagtatgggaataaatttaattaagtatgtaatgaaaattataaaatattaatgaaataaatagaaaaggatataaaaaattgaaagatattttattattatggattgggagaattaatattgttaaagtgattatattatttaaattaatttatagatttaatgtaatatttattaaaatattaatgttattttttatagaaatagaaaaagaaattttaaaatttgtatggaattataaaagattttgaatagttaaaataattttgagtaaaaagaataaagttggaagtattatagtatttgattttaaaatatatagttatagtaattaaaatggtaagtaaggtattggtataaaaacggatatataaattaatgagatagaatagagaatttcgaaataaatttatatatttatagttaatttttttttttttttttttttatttgagacggagtttcgttttgttatttaggttggagtgtagtggtgcgatttcggtttattgtaatttttatttattgagtttaggcgatttttttgttttagtttggaatgatagtcgtgtgttattacgtttggttaatttttgtattttagtagagacggggttttattatgttggttaggttggttttaaatttttgatttcgtgattcgtttgttttagttttttaaagtgttgggattataggcgtgagttatcgtgtttagttatttaatttatttttaataaaattattaagaatatatattgaggaaagggtagtttttttaataaatgatgttggggaaattggatatttatattaggaagtatgaaattagattgttattttttattatttataaaaattaattgaaaatgagttaaggatttaaatgtaagatttaaaattatgaatttattgggagaaaatatatagaaaatattttagagtgttggacgtaggaaagattttgtgattaagattttgaaagtataggtaagagaagtaaaaatgtatgaatgggattatattaaattaaaaattttttgtatagtaatgaaaataattaatagagataaaatagtaatttagagaatgaaagtatttgtaaagtatttatttgataagggattaatagttagaatttataagaaatttaaataatagtaaaataataatagtattattttaaaaggagtaaatgtgtatttattatttacgtagtatatattgtatttaaattgtagttttttgttttttattttttttttttttttttttcgagtttttagagtttattgtgttatttttatgtttttgtatttttatagttttgtttttatttaagagtgagaatatacgatgtttggttttttatttttgagttattttatttggaataataatttttaatcgtatttaggttgttgtgaatgttattaatttatttttttttgtggttgagtagtttttttatttatttattgattgatgggtatttgggttggttttatatttttgtaattgtgaattgtgttgttataaacgtgtgtgtaagtattttttttatataatgatttatttttttttgggtagatatttattgtgggattgtgggattgttggattaaatggtagtttaatttttagttttttaaaaaaatttttattttgttttttatagtggttgtattagtttatatttttattagtagtgtagaagtgttttttgtttaggttaggtacggtggttttagtttgtaattttagtattttgggaggtcgaggagggtggattacgaggttaggagatcgagattattttggttaatatagtgacgtttgtagttttagttattcgggaggttgaggtaggagaatggtgtgaatttgggaggcggagtttgtagtgagtcgagattgcgttattgtattttagtttgggttatagagttagatttcgttttaaaaaaaaaaaaaaaaaaaaaaaaaaaagaagtgttttttgtttattatatttatgttaatatttattattttttgattttttgattatggttatttttgtagatataaggtggtattatattggcgttttgatttacgtttttttgattattagtgatgttgagtatttttttatatgtttgttggttagttgtatatttttttttgagaattgtttatttatgtttttagtttattttttgatgagattgtttgtttttttttttgttaatttgtatgagtttgttgtagattttggatattagttttttgttagatgtatagattgtgaagatttttttttattttgtgggttgtttgtttattttgttgattgtttttttgtcgtgtaaatattttttagttttattgggttttagttatttatttttgtttttgttgtattttgtttttgggtttttggttatgaaatttttgtttaagttaatgtttaggaggttttttttaatattattttttagaatttgtatagttttaggttttagttttaagtgtttgatttattttggttgatttttgtataaggtgagagttgaggatttagttttatttttttatatgtggttagttaattattttagtattatttgtttaataaggtgttttttttttatttgatgtttttgtttgttttgtcgaagaataattggttgtaagtatttgggtttatttttgggttttttattttgttttattggtttatgggtttatttttatattagtattatgttgttttggtgattttggttttatagtatagtttgaaattaggtaatgtgatgttttaagatttgttttttttgtttagtttcgtttttgttatgtaggttttttttgggttttatatgaattttaagattttttttttagttttgtgaagaatgttcgtggtattttgatgagaattgtattgaatttatagattttttttggtagtatggtaatttttataatattgattttatttattcgtgagtatgggatgtgtttttatttgtttgtgttatttgtgattttttttagtagagttttgtagttttttttgtagaggttttttatttttttaggttaggtatatttttaagtttgtttttttttttttttttttatagttgtcgtaaaagggattgagtttttgatttgatttttagtttggttattgttggagtataggagagttattgatttgtgtatattaattttgtatttagaaatattgtagaatttttgtattagttttaggagttttttggaggagtttttagagttttttaggtatataattatattagtaaatagtgatagtttggttttttttttatcgatttggatgatttttattttttttttttgtttgattgttttggttaggatttttaggattgtgttgaagagaagtggtgagagtgggtattattgttttgttttagtttttagagggaatgtttttagtttttttttatttagtattatgttggttgtgggttttttatagatggttttgattatattgaggtatgttttttgtatgtcgattttgttgagagttttaattataaaggatgttagattttgttgaatgttttttttgtatttattgagatgattatgtgatttttgtttttaattatgtttatgtggtgtgttatatttattgatttgagtgtgtttaattatttttttttttttggtatgaaatttatttgattgtggtggattatttttttgatatgattttgaatgtttttattataaagaaatggtaaacgtttgatgtgatgtataggttaaatatttttatttgtttattatatattgtatatatgtattaaaatattatattgtattatattaatatgtataattatgttaattaaaataaataaaaatagtagttatgattttaaataatttaagaaataatataatggattaggggatgaggaaataatatgatttagttttgattaattagagttttttatattgtattatatttttataataataggtattggtttaaaggttattttttttggttttttatttatgaatattgtgagaaagatgtttatttttttgttgaagttgttaaggtagaataatatgagaggagttggagttgataagttgatattggttattttttttagaagtatagagagatttgatgataaatgtattttcgaatttaattatgtttttaggtagttttatttttggtttttttagataaatttatatgttgaattttttttttaaaattattaatttgtgattaaaaaggttttgtttttataatataaatattatttgtttttaagtgaaggttaaatagattttaatgttttttttattagtgagttataattattagaagtatagttttggatatattatttatattaattttttttatttttagtgttatatttgaattttgaagatataaaatgagttttgatttagtataaggattaggaggtagaataaatgtaaagtattaggatttgatatttggaaagtttttttaaacgttttagttttttttattatttgtaagttgtattattaatttattaatagtttttgagggaaaatttaaatttgtattaaatatttgtagtgtttttggttgattggtatatttatatttatttttttaattatgtaatatttttttatttatagttaaattttaagatttatatttttgagaaatatagagttaaaagtattttttgatttgatttaggttataggttattttgtatagtattattgagatatatttatttgtaaagttttttatatatataatttttaagatatataatgttgtatggagatatttgaatttttataaagatgttggatattttattaggattttatggtattggaggtagataagattttttagaattaaattagtattttttggtttgaagttttatatgttgagatatagagtttttagggttttttttgaatatggtttttaagatgaagagaaaatgttaggttatgagatttaaaagagaggagttagagaaatattttttttggaattaggattaattttagttttgagatttagttaaagaaagatatagaagttaaatatagggttataatttgaagatataagaaaggtaagattttatagtgttagtgttgagatggggttagttgtataatatgattttagaattttagtgttgatattattttaagtttaattttttaattttttaatttagaatgttatattttttttttttatttttacgttattttttgtagggtatttttgtatggcgtgtaaagaattttttttgatggttattttttgtgtttgtttttggagttttttttgtgttgtatttgtgattatattgttttataattaggttttttttttagaggattgagggttttttttatgtatttttagtatttagtataagatgagttttattgtatattttattttatttttattatatattatttaaaaatggttttataaagtttatagtgaaaatttttaattttttagagataggaatttttttttgttttatattttttaatttgaaaatttttgttttgtagaagcggttattttttgttttttaaaaaattaaatatagaattgatatatgatttagtaattttttttttgggtatagatttaaaagaagttaaagtagagattaagtagatatttgtatattatgtttataataatattatttataattgttaaaaggtagaagtaatagagtatatatttatcgatggatgaataaagtatggtagatttatatagtggaatattttttagaagaaggaaggaaattatttttttgtattatgtatgaattttgaagatatgaagttagattaaataaattagattgaaaaggaaaaatattgtatgaatttatttatatgatttatttagtttagtaagatttatagatagaatgtagaatggaggttattaggggttggggaggaggagagagtgaggagatgttgtttaatagatttagtatttagtttgggaagatgaaaaagttttggagatggagggtggtgatggttatatagtatgaatatatttaatgttatagaattatatatttaaaaatggtaaaatggtaaattttattatatatttttttaattataatttaaaaaagtagttattttagtgttttaaatagtttttttttatttttatttttatatttttttattttttgtttaaattttttttattttttatttttggagataaggtttttttttgttatttagattggagtataatgatattatggtttattgtagttttggttttttgggtttaagtgatttttttattttagttttttgagtagttaggattataggtgtaagtttattatatttggttaatttttttgttttttggtagagatggggttttattatattgtttaggttggttttgaatttttggttttttaaagtgttgggattataggtttgagttattgtgtttagttttaaattttttattatagaaaattttaaatatataaaaatagaattatataatgaatttttattatttattattatatttaataattattaatatttgtttattatattttatatgtttttatttttttttaggagaattttaaaaaatagattttagttttagaatagttttaattataggaaaattgagaagttgttttttttgttattaatatttaatattagtatggtttattttttataattattgaattaatattgatgtattatttttaattaaaagttatatattatttaggtgtttttgagttttatttaataatatttttttattttaaggttttatttaagatattttattatatggggttgttatgtttttttaggttttttttggttgtgataattttttagattttttttgtttttgatgatttagacgttattgaggaatattagttaggtattttatagaatgtttttttattggaattcggtgttttttttttgttttttttttttttttataataagtagaggttatggattcggggggaggaaagttataagtgaggtattatttttattatatgatattaagaatttatatttttagaagagggagttaatgttgtttttttaaggataaagtatttatttattttatttggagtttttttgtaggagagattttgtttttttttttttattgatttatttattatattatttatattattataaatttatttttggaggattgtaaaagtaaattttttatatataattttatagttaaatagtttagtatgtattttttatagaatagggtttttaaaaaatataaagttatgttatttttatattaataaaattaataatagttttttaattttgttaaatagttaatgtatatttaaatatttgttttgttttttttaattggtttgtttgaaatagaagttagagaaggtttatatattgtaattgttttttatgttttattattttttgtttttttatattatattatttattttatttatttttttttttttaaggttttgatttgttggagaaattgttattagaaaaataggtttcgatttcgattttaaaagagtatttttggattttgtataggaaggaattaaaggtgagttatagagtgtagtgagaaggagatagtttattgaaagttatttagatatagagtaggtgtttttagaaagtaaaaggaagaatgtattatttttgttgtaaatttttttaatgtaggggtttaatttatataaaagttaagttaaatgtttatgtgtgggtgttttgatagtatgataaaatttaggatttattgatttaaagaaagttatttttggtattttagttagtatattaaagtatgattataataattttaaaagtatatattataatgtgacgttaggatatgtggatattttgttgtttgttataggcgtttgtttttgtaggtattattaagttgtttaattagttgtaaattttttatgattatgggttgtgattggtaaggaatatgttttgttagttgaaagatggagttgattttaaaatggtgttattttggtttttttatgtttttgtttttttaaaaaagttaggttatttgttttgtagaatgatttatattttgagtttggttaatgatatttttatggtattaatttgtttttttatatgttgttttttttgttatttataaaataatttttttgatatatatttgtaattttattatgttagtatttgttattttttatgttattaaatttttgtttaaggattattaaagttatagttagtggatattttgagatttttaggggagggtggagatgttgttttttaatatagtttgatttaagtaatttttttatttggtatggtgaatttagataagttaaagaatttattacgttttaggtttgtattagtttttttttaagattttgggtatttttattttttttttttttttttttaaaggaagttatagttttttataatttttgttagtgattttggattttggttgttttttgaggttgtgttttttatattgttgttattattgttatagtagaggtgtagaaagtttaggagagagaagggaggaaaagttgaagattttgtgttatttatgtttttttgatttcggcgaaagtgttttttttatttgtaattatttttgtttttatattgttgagttttgtgtttttaagattaagggaagtttattttttttaaagttagttatagtttttgttggttgatggaatatttgttgtttagtagttgtatttttgtttataaatgtaaaatagtttgatgttacgtatattttagggtttagattggaaatgttgttttttgtttttttgttattttttgatagggattagtttatagtgtagttggtgttataatagtttcgaagaagttttttaatagatatttaaatgtgatttaaagtggtataggtatatattacggtgttatatggtgtttatgtaaagtaggtatattaggaatgttaagtagagaagtagtagaatatattgatttttatgtttttattgtatagttgggtgtaattaagttggtataatggattttttttatggttattgttttagtagtgtggatgtttttaaatgttgtatatttattaggatagttaggtagagatagttgtgtattatgatataatagtagttttttttagaggaagtgattttgttagaagtgggagtttttgaagttttttagttgttattggtttgtttttttatagcgttattttagatttgttggtttagttatttatttcgttaataggtttgtttttgttaataggtttagttttgtttttttagtatatgttttaggttttgattgtaagtgttgatttgggtttttagttttatatagattttttgttttatgaaagggttatttatgtaaagtgttttttaaatgttaaaggagttaataaattaaggaataagatagataaatttagttgttagtaaagagtgttttattggggaatttatagatagaagcgtggttttggatggtagtaagataggtaggtttttgtatttattatttttatatttagggtttatatattataggggaagagtatatatgttttgtgtaagataaaggttattattgtttagaataggtaagaatgttaatgtgttatagtttagaatttgtataatattaaggttgatatgtttttataatagggatggtaaataaagtgggaattaggagttagttttgggattggggttaattagaagttagtatagagaattagtatttaagagggagttatttttttttttatattttagttttttaatttagtttttataattttatggatttatattttttttatagtttttgagtttttagagagggttgtgggtgatattttgatggtgtgagtgatatattttattaatttgttttttatttgttaagtaggggttatagtaataatataaataataggcgatgatatgtatgttaggtgtaagatatagaattaaaaatgttttttattatgtttatttaggaattaaattaagaggtatagagtagaataataataggaatagaagattatgggtggaattaaaaatgtttagtaggtatttggtggggtagtttttttttattaaatagaattattggtagttttatttttgttgattaggaatataggattgtgggttgggagtatatattaaatatgttgtttgaggggtaaaggcgttggtattatgtgtaaggttataggggtagtaaaggattatgttaaatggttagttagggtgttttttaaaagggattgtgttttagtttattggtatgtggagtgttttggtttagattttagtaggattaatggagattattttagttggtagggaattttttgttgtttggaaagaaatgttttatttaatataggggaagttgttagtttaatttttatttaagtgttttttttttggtttaagattttgaggagttttaaataatttttgttattggttttttatttgtttaggttagagatgtatttggttggattttttttattattatggttaatggatttatttttgtggtggttttgagttattggtgtggtgttagtattatatttgttttaattaaattaaggtttttaatggtttgaggtaaaatttttgtttaattatgaaagatattggattttgagagtgtttaaaattgtgtttttaaaatattatttttttttttaattaattttgttgtttgggggagtatatagtaagtgaaatatttagtttatgttttttttatgtatttagttttggatatcgtgtttggtgaaatgtatgtttcgattgttattaatatgtggagggtatttttatatgatattgagttgttttaagtttttgatggtggttgtttggtttgtttttataagggaaagtttgtaataattttatggtagtgtatatatatgttagtgtatattttcgttttaagattattggtaagggtttgatgtagtttatttattagtttgttataggggtggttgttttatgtatatgtttaggtgtatgtgggatgtggtagaggtatagacgggaataaattaagtagtttgttatcgttattattaaatttgtatagtagagagttaattttgttttttttgttatttggtagtttatttatgtattgaaatttttattgtgatatgtatttaattaattagtttagtattttaatttttgttaggatgtttgtttttatgtttttgggaggtgaatttgattagtgtgttgaagtaattaggtttatagtgggtttttgtagatttttttaaatgtttttttatatattagttttttataaggatttttaaattatatattaattattttaggttttttgggtaagttaaattgtaagatttttaagtattgttagattgtttgtatagagaattataggtggtggtttacgggtataaattaattatgtagtttggagttttgtttattgattgttttgttgtatttttattttaaattagatattgtttgtggttgtgtagttattattgtttatatatagggttattttggtttaatgtatttaagtattaagtattattaggaatgagggttatgtttttatgtattattggagatattttttgtgagggttttataataggggtagtattggatttataatgtattggttttaagatagtatgtagtttattttttaagggatgtatggagaaggtattatgttgttgtatgtatgtatggtatttttgtaaagtggaaatttgggtaatagttgatataggtttggtaaatatttttatttagtttttgataggaaatttgttttttttggtattaggaaagtagtagttatggatttaatttgtggtaagattttttatatttttaggatttgttatttaattgggaaatagtaggttttagtatttttttattaattgtgattaaaattttaaaggaattgtttttttatgttggattttatatttttattatttaaaattatagtttagttttatttttaaaaatatgttttttgtttttatttgttttataggtttttttttgaaatttatattgtatggtaaggttttttattgtttgtattttgtggattgtacgttaaggtgtggtttaatgtatttttattatttgtattttttgtaaattggtagtttggtatagaggtttgtgtatatttagggtttttttttttttgtaagtattgatggttttgtaaaaggaaaataaaattttggggttttaaaattattaagttaaagggaaaagttaagttgggaattgtttagggtaaatttgttttttatttgtttagagtcgtttttttgtttattgagataaatatatgtttgatttttttatttggaaaggttaatcggaaatttaaaagaatgtaattatttgttttttatttatttgtgatttggaagttttttttttgtttcgagttgtttcgtttttttagacggaattaatttttagtttatatatgttgattattgttttatgtttttttaaaatgtataaaattaagttgtgttttgattattaaagttgtgttgagaagtgatattaaagaatatggtggtataagaattttaaggattttttttttttatagcggtaatgtgtttgttgaaatattagtataaaaaaattcgatgagagttgtgattggatttagtgttgatatattttttgtaaattgtggtaaaatatgtatattatataatttattttttaattatttttttagtgtataatttggtggtagtaagtatatttatagtgttgtgtaattatcgttaatatttatttttagaatatttttattattttaaatagaaattgtatttattaaattataattgtttattttttttatttttagtttttggtaatttttattttattttttgtttttatgaatttgtttattttagttattttatataagtaaaatattatatttgtttttatttttggtttattttatttatagtgtttttaaggtttatttaattagaattttatttatttttaaggttgaataatattttatgtttatgtgtatcgtgggttgtttatttagttattttttgatggatattcggttgtttttattttttggatattgggtatagtgttgttatgggtttgagtgtatatatatttgggtgagtttttgtttttagtttttttgggtatgtttaaaagtggaattgttggtttatatagtaattttatttttatttttttgaggaattattattttgttttttatggtggttgtattattgtatatttttattagtagtgtataagtgttttagtttttttatatttttattaatatttggtttagtgaagtttgttatatttttatgtttttattggtattttttttttttttttttttgtgaaatagagttttgttttgttgttaggttggagtgtagtggtataatttcggttcgttgtaatttttattttttaggtttaagtgatttttttattttagttttttgagtagttgggattataggtatttgttattatgtttaattaatatttgtatttttttggtatagacggggttttattatgttggtcgggatggttttgattttttgatttcgtgattcgtttatttcggttttttaaagtattgggattataggtatgagttattatgtttgattagtattttttatttttatgtttttattgtatattttttttggagaattgtttatttatgttttttatttatttttgaatgagattgttttgttattgttgaattgtagttttttatatattttggatattaattttttattagatatgtgattggtaaatatttttttttagtttgtgtatttttttttgatttttttaatagtgttttttgatgtaaaaaagtttttaaattttgatgtattttaatttgttattttttttatattatttgtattattggttattagttaagaaattattattaattttaatgtttataagattttttttagtatttttttgagggttttataggtttaatttttaagattagttttttgagttattttgatttaatttttgaaaagggtgtaatggaaggatatgaattttttttagtattatttttttgtatgttgatatttaggtttttagtattatttgttgatgtattatttgttgtagtggggttgatatatttgtaagatgtagtgagtattaatatatgggagtattatgtatttatttatttgtttttattttatagttgttttgagaaggtttttattgatagatttaatagaaatgaatatatatgattttttataaaattatatttaagtaaaattataaattttaaaatgttaagattggagtaagattggaatattattagataagttgaaatataggttgaaatgaagggttatgtttattttgttataaattttgttggtttataattttttatgtttattgtttaagagagttatagagtggggtgatagtttatataattagtttttggttttttgttttagaaagaagtttaaatattttgtttagatagagtaaggaaattaattgaaagatgtttaatgtgaagttggtatttataaagtgaaggagtgagtagtaagtgtaaatattaggaattttaggagattttatttttttgtacggaaatggttttattatgtattgttgaagggagaaggtttttttaggggatttttatgatgaagaagaatataatatgatataggaattttttgttgtagttttaaattgaattgtttttttttttaattataggttttataaagttttatagttttaatgattttatttgggttaagattttggtttttttgatgttatttgtttgaattgttgtttggggtttagaaaagtgatttggatattttgttaaaatggattttttttgatggaatgtgaaattcgtaaatattttgtttttttgttgtatttttagagtaggttgagtattttgtatttttttttagtatttcgttagaagtggtagaagatttggagttagggttttttttaatttttattttttttttaatttagaggattataaattgttgggagaagagtggtattttgggtttttagttgatttgatgaatattaatatttaatgttttgtagtgaagttatgtgtgcgtgtaatattatttttttacgtagtgttataggaaagtgggtttttggattttaggttaagagtttaagtattaaaggtatagagttagagttttaggaggggagggatggttggggtggaatttcgttttgttatttagttttggggtttttttattttttatatggtgggtggtgggcgtttggtaggtgtcgatgttgatggagttaagggagggaattagtcgggatagggaaaaatagggttggagagataattaaggtggatattattttttttgagcgtaagtcgtggttggaaatttggagagtttgaaagagtatttttttatttaaatttgtttttttttttttttttaagttttatttggttataggtttagtgttaatattagggggcgttatagattatgaaggcgtttatagattatgaaggtatcgtgtagttgggattgtttgtggtcggttattgggtttttgatttaattaggggagttaagattttgtagttaagtggtttggatttaatttgtagtttaggttttattgatatttttttttttggtgttttagttttttaatttgtgaaatggtgaggatattatagtatttatttttggggcgggttttttaatagtagtattattaataatttgggatagagaattttgtggagtggtttgttttgtgtattgtgggaggtttgttagtaatattttatttatttttttttattaatttttatgtgataatcgaaaatgttttaggatttttaggttttttttgggtttagaagttgtatttaggtatttttttatttgatatttgagtttatttttgttttggtttatataaggttattttaaaaaaatgttgtttttttaaagattttaattattttttaaataaatttattttttttttttatttttgtatttagttaatttttttaaattttttgtttagtatattttgaaatgtattaatttttgttttagtaattaatatatgtgatttgtatgatatttgttatgatttttagtagagttttgatttttttagtatagggaatgtgttttcgattttgttttggatgatgtaaattaatttattttattttatttgtttgggatgttgttttttatttgtaagatgtaaatgtggatatggtttggattattaagtggttttattttttaatttatttgatatttgttgtgtatttgttgtaagttaaatatatggtatggtattgtttttttgtttatattatagtaaatgagaaaatgagatattatagttaggtgtggcggtataggtttgtggttttagttattcggaaggttgaggtaggagaattgttttagtttaggagtttgaggttatagtaaggtatgatattattattgtattttaatttgggtaatagattttgtttttgaaaaaagggaaaaagattttgtgagttgtttacgtgtattttatgttttaggagatttatattttgtaatttttttaaatggcgtttttatgtggttttttatgaatgtttgtttggtattttttatttttttatttttaatttttttttattttttattgaaattatgttttttgtaaatagtttatgattatttatttagttatttatttttatttttttgtattatttgttttgtaattggagtgtttgagtttattatgtttaatgtaattattgattttattgggtttaagtttgtttattgttatttgttgttttttaatattattttttttttgtttaattattttttttatgttattttttttagatgaataaaaatttttgtattattgtagttttttaagtgttttaattatatatttttttattatttttttaattatttgagaaagtataatgatttgtgatttattataattaatagtagattataatttttttgatttttatttatttgtgtttatagtttaggggagaattagtgttttggttttgagatataggggtggtgggagtaggagagtgattggatgatgaatttgtagttgtagaggtatttgggttttttatttgtattttttatagatgttttttttattgaatgtttgcgatgtttttttttttgtgtatttttgttagagtttttttatttttattgatagtagttttatttttttgtttatttagtttaatattgtgggtgtttttgatttttttttttatatttattagtaagtgttgtgagtttatttttaaatttatttagaatttttttattttttattattttttttgtttatattttagttaaggtaagtaacgtgtttattttagaatattgtattttttttttattattttttttattgtattattggttttttattttttaattttgtttttagtatagtagttagaaagaagtttttaaaggatgagttttattatgttttattttttaaaattgttttttttatgttatttagagtaaaggttaatattttttttatattttttagggttatttgttttagttatatttttgattttattttagtttttttgtgtttagtttttttggtttttttttttttttaggaatatagataattttttgttttagtgtatttgtattgaaggtttttttgtttgaaaagaatttttttagatatttttgtagataattttttatattttttaaatttttattttaaggttatatttgtaataaggtttatgttgattatttagtataatagttatttttttgtttttatagtttattttttggattatttgttatatagtatttgttattttttaatttaagtattttttgtttttattttgtttatattatatttattatttgtttatagaggtgtttaattttttggtttttttgggttagttgggaagaataagtattgttttgagttatatataaaatatattaatgatagttgatgagtagaaagaatagaaaaaagaaaaatatgtgcgtgtataatttttatgatatttgttattatagataagtaaaaaaattttttatatttaaagttgtttcgggttatacgtagttcgagagttgtaggttggataagtttgtatttagaacgtatatattataaggttagaaatttttttgtttttattttaatgatgttttttaaatgtaaaaatagttatatatttagtagataataaatgttagttgaatgaatgattattgtagagtatttttgtattttaaaggtaatatttttattaacgtagttaaagaataatattattttatattaatattagtgttgttagtgttttttttattagggttgtttgtgtgttttttttatttttttttatattaatttttttgtatattgtagcgtatagttatatttttttgtttaggaaagataattttagttttgtgggtttaattttttaattttatataaatttaaattagattttgttttataaatgtatgagtttggattggagttagtattgggattattataatttaggtaggaagaagagtaggaaagtagaagaggagttttaatagaaagttatttacgatgagaaattatgggattttttttttttgtaaattttagaatttgttttttttaagaaggttggggaaaaagatggaaaatataatttaggaaagagatttggaaggagggtaaaagatataggggattgaaaatttgtttttttatatcggaaggatttcgatgtgtagggattattttaggtgatatttaagtttttgtgattataggttttggtgggataaggttttattgaagggttaaggatagtggagtagtaaagatgatttaggtgagttgtgattatataaagtttatggtggtttgagtatatattgggtatagttttatttattttttttttttgtaataaattagtataagaaatacgtggattttggaaggtttttatgttttttatttattttgttttttaaattttaggaatttttttttttaattaatttattaattcgttatggaaataatttgaaaaaagtaaatttatatttagattttaattttaatagggaagtaagaagttatagtttagtgtattatgaagttgagatagagatggagatattttagtattatttttttggaataggaaaggtgatcggggaaggaatgtaggttagtgtggggaatagggttatggtggatacgggtgtgggttggtttttttattattttatattatgtttatagggatatagatatatttagatgtttttgtagaaagagaagttagggtttttgaagttataaagggaaggtatgaataaattttgttttttagttttatataaggtagttgttttatattatagaaaaaatatttatgaataaatttatattatttatagtgaggggttatatttttaatagtttattatgtgttgaatatatttaagttaaagaaattttatagtatagttatatttattgttattttaataatttatatatattagtttttttagggttttagttttataagtcgtgagagatatattagagttttgggtattttggttgtttggggtagaataaaaatagaatttggttagattttataggagatgtggttagaggaggaattgtggggtgggtgagtttttttatgggtttttaattataatattttaaggattttagggattagttttttttatatttatttgtagtttgagagtagttttttttttttttatttgcgggaagaaaacgttttgtgagaggttaggaaggtagtagggttatgaggttttagaggaattttttagttttggaatttcgagaagtttttagaaatgtgtgattgtaaattaagggtaggattaggaaaaataaggaaagtagatgtgggttttggattaattgtttttttaaggtttgtttttagtagggatttttttttgatttgtgattattggggttagatttttattattataattattaaggtgagaaatttgttttttattgttataggtgtttataaaagagtaagtgttggtatatagggtttaggttgggtaggtttatgaatgtggatggtgtttttcggtaattaggtagaatatatttttatttggagtttgaaatttttagtgggataagaaaatttaaattcgattttttattttttttttatttgagtttttttttttttatattatagtagtgattatagttttagtgattatagttttaaggagaattaggttagtaatgatatttataatggggatggtgggttggggagagggttttgggaaaggaggggaatgtgagggttttgatttttaggatttagtttcgattttgttaaaggtttttagaggggtttttgttttttttaagagatatggtcgtttttatttttttttttattttattttaggatgaggggtttgggtagttttttgtgttgtatatggtatgtgtatttttgtttttttttagaaggtattattataatcgtttatttttggaaggttttattttttgtgggtttggtttttacgagttttatgttttgggtttggttttttttatttcgttgttaggttaatgtgattttcgtagggtagaagtttagaatttaggatttcgttatgttttatgtttagagaggggggtgggttacgtgtgttttggggggggtttgaaaggaagagtcggaaaatttaggtattttgtattttttatgggatattttagtagcgtttatgtgattattttgatgaataggatatttggggtggggaagggagtatagagtttagatattagtttggatataggcgtttgggataattttttattttttggaaagttttagtttttgagtagggtagtagggatttttggttttgatttgagtggaggttaagggatttagaggagttggagttagatttcgatatattgagtgtgaggtagagaataaggttcgggaggaaaagttttggtgtttaaggttgttgtggggtgaaaggggatcgcggattagttttttagggattgtttttttttttatttttttagagattttattttttaattgttttaggaagagtagggtgggtttttagagttaatttttgatataggatttggaaatttaggaggattttttttcgttaggataggagggagggcgatattttggtggtgtttttattttttttttttttttgtgcgaggttagttcgggagatttataggagatcgagtaggttttttatggtttttggtattcgcgcgttgtagcgtttttttttcgttttttaggtgtttgcggagttattttatgtaggtgttttttaggtaggtttttttttgtttagttatattggtcgttttatatttgcgttgggtaatttgagtcgcggtattcgcggcggtttaggagcgtaggttttcgtttagggcgatgtaatttttgtcgtcgtaggtatattgtttatattcgcggaggagacgttcgtcgggttttaggtcgtagttaaatattttttggaggatgtgatattttggtttagttttcgcggttagtttcgtttatcgagttttggttcggattttagtaatttgcggagattttggttttaattgaagatgaaattaggtaaaggcgtttggggttttttcgggtcgaggatttttgtaggtttcgtagtttcggggtcgattttggattcggagatttaggggattagggtcgttcgtgaggtatggagcggggagtaagtgatttgcgtttcgggtcggggttatttattcgtttcgttttggttgtagtagcggagtagggttcgtaggtttattcggttagtttgtgtttgggttttggcgtttagtgtttgtaggttttaatatttcggttttttttgttttatttatcgcgttcgcgtttttatttttagatttacggcgttattgtcgattcgtacgaattgcgtgtcgtttacgtagtttacggtaatgaagttgggtttttcgcggttcggttaggaaacggcggtgttgaaatattttatggagtgggagtttgggggcgaggaggggttgagattcgttcgatttttttttcggcgcggtttttcgggttttgcgttttagttaggtggatttttcgttttttacggtagaggtcgttttttttttgatttcgtatttattcgtttaggtttcggttagggttagggttttcgagagtagtaggaggagggttcggggcgttatgattttatcgtcggcgtttggggagatttcgagtttcggtgggtgcgtggggattttagaatcggggtcgcgcgacgttgattggtttttttagaaattcgatatttagtgggagtgagaattgggttcgcgtcgtgagtgtttaggaagaaggattcgtcgtaggttgggagagggagaagagaaattttgcggagatggggaatttttaatgttgtatttttttagtttatgtatcgttttcggggtttgagattttgagagttatgtttggggttttgggatttcgttttgatttcgttttttttgtgataaacgttttgttttaatgttttttgagttttggtttaggagttgttcgagaaattaggaagaaatttttagtttgggtttcgtttttttttttttattttttattcgggaatttttgtttttgaaatggattttttgtttttttattgtttatttgtttttttggattttttaaaaagaaaatttattttagggagtttggtgttagagagggagttttttttgggaatggaggtgtagagatagaggttttttttttttattttttttttttttttttttaaatttggaaaagttgtgtttgggtgtatgagatagtatagagattagtttgttttttgtgtattaattatagtgggtagtagaattttggtaatttttgaatgattaggaatttaatcggtaaaaatatgtgattttggttttttgatatataaagtgtttaaaagtattataataggatttataaagtttttaagttttatttttgtaaataaggtatttgtgattttcgtttgtggtgttttaaatttatttttattttatagttttgagtttttgtgagtttaggatatttttttaatataaagtagttattgtgtttttatgtgttgtaattaggagttagtatagattttatttattttaaagttgtaagcgttcgatgtagttataatgtttattattagtgtttatgtattgtttgtttttaggaagtatttatatttaagtggtgtgtatattttttaggaatatttagtatttttaaaatttgattaatataaaaataattagtttttaagtagatttatttaaggtattaaaggttaattgtaagtaatattttgcgaggttttgtagatggatttattgaaatattattaaaaaaagtgtttaaatttaagagttgtgttgtttttgaattttatttttttattttttttttttatttattgtttttttagttttttttttcgttttttttattatttagttttttttttttttttagtttttattatattgttatttttgaattgtgatattggtattttttcgttatttgttacgtgattgttttttttatagtggttttgttaatgtgagttaaagtgtgttatttttttatttaaaatattttagtggttttattttggttttgtgaagtttttagaatgttaggtacgtgagtatatgaggggatatttggtttattgtagggattaaattaatttttgttgattgaatgaatgaaatatgagtatattaaattgtattatagataattataaaatgtaaaatattgaaaaagtttagaaagattttattttatgtaattagtgtatatattaatttattagtttattttattagtttgttgagtttgtgtatgaattttataagattgtgtaaaaaattattataaatattggttttaaataatatttatttattgtatttatttatttgtttttatttattgtatttatttatttgtttttagagatagagtttttaaaaattgttatttagcgtgaagtgtagttatatgattatggtttattgtagttttaaatttttgggtttaaggaatttttttgttttagtttttagagtagataggattgtagataagtgttattatatttagttaattaaaaaaaaaagtgtagagacgagtgttttattgtattatttgggttggttttatatttttggttgtaagtgatttttttgtgttagttttttaaatgttaggattataggagtgtattattacgtttggttaaaaaatatttatttatttgtttatagtattttagttagaaatttgggtatgatgtagatggaatttttgttttaggttttttaaatttgagtttttattttgaatttttttttaggtttatatagaggtggtagaatgtgtttttttgtagttttaagattgaggtttttgttttttgttggttgttaatgtagagaatagggagggttgtatttaatttttggtgtttattagtgttgttttttatatagtttttttatttttaaagtttatagtggaggaaattttttatgttgaattttttttatattgtgaatttttatgtttaggaagaatttagtttttttaaggatttttttgattaggatagtttaagtagtataaatttagtttgaagttaattaattgagtttttttattatgtttgttaaatttttttatagtagtatttatattagagttggttgaataattgggggaaggtgaatgattaggaggtggttgttggggttattatagaattattttagtaagggatgaattttttttttgtgtttaattgggatatagttggaaattgaagtttaagtaaagtgattattgtgaacgataataaaatatattttttttagttatggaattttttttttttttttaaaattaagttatatgtttaatgttttataattaagttaggtaggggtggtggtttacgtttgttattttagtattatggaaggtagaggaaggtagatttgttgattttagaagtttaagattagtttgggtaatatggtgaaatttttatttttataaaaaaattagaaaattagtttggtatggtggtttatgattatagttttagttatttaggaggttaaggttagaggattttttgagtttaggaggtcgatattgtagtgtatggtgattatgttattgtattttagtttgggtgatagagtgagattttgttttaaaaataataataatgatgatgataaatttagagtaaatgtaaattaatatgtaataatgtattttgttttgtgaaaatgtattagttatttattatgtataataaattatgtaaaatttagtagtttagaataataaatattttttattttttatagtttttaatgattagaaatttaggagaggtttttttgagtgtttttggtttagggttttttataaggttgtagtttagttgttagtttaggtttgtattatttgaggattttattgagtaaggttatagaggagttttcgagttataattggttattagaggagttttttgttttttaggaatgttttgttttagtgttattggtatgatttattagtcgttgggaatagtttatgggaagtagggttttagtattaatgtattgaggatgttagaatataagagtagggttttgggagattgtttataagtgtgatttaaattttttgttttgacgggtttgggtttttggaaattaaatttttttaggttgaattgttggatgattttgtttatatttataatggggtaagggaaattagaaggtttttaggtggatttttggtttttatatatatttttatttttgtgtgaaatagttatgtttttttttggggatgaggatttatttattatttgggtttggagaggaggagaattttttttttattaagtggtatttgggtatatattgtttaaatttttttggtgattaaagtaatgtgtagtttagtgggttgttttttgtttttttttaggggtatatttttttggaaattagaatttcgtattttgtatagtttagtgttgggagataaaatatgcgaaatattttattgagtgaatttaagagattggatatggagttaaatttgttttcgttttttgatttttggatatatatgttttttttattgagaatatagaattttagagacgtttttgatttaaataatgtattgtgttttgaaagatggtatttattttttagagtgttttttttaggttggtattgagttgtgtttgtagaagatttgtttagttttttttgtggttggtagtttttgggtagtgtagatggtgataggattagtggaatttatagtcgtggaaatattgaaattttttttgtaaagtgggttttttaggtagataatgggttaggagtattgtttagtttgtagattaggaatgttaatagtatttagagagtggtgttggttgtgtttgagagtaggataggaaaatttatttatagaatcggtatttaattttgtgaagatgaaattttggtttttttaggttggaagtagttaaatgtagttaatttgttatttagtgggtagttatgtaaagaaatagtgttttattagggtatattatgggttttaattgttgatgagttggatatttagaggtggtagtagttggatttgttttggtgtggggaagttagtgttgttggttttttacggagttttatgtttgttattgtggttgttttatttatgtatttattttattaggtttgggttgatttatggtgaaagttggttaattgttatttgtttgtttggtagtttagtgttattttagatttgggtgttttttgtgggtgttagtaagggatttaagtttaatttaggtggattgtttttatttgatgatgaatgttgttgggtttgtattatttatgattttgtgggttatataggtatttggaatttcgtagttgtttggtatttcgtggttaaatattttattgaattaggataaggaatattaaaagttgtttttaatagggggtatgtgtttttgttgtggatgatatgattttattttagaattttaggttttttattgtgatttttttattggtgtttggtttagttttattttgtgtttttttttattattggtattattagttttaggggtttgagggatggtggttgtttgtattatggtttggatttgttgtagggtttttttttgtgtaggttttatttgaagttggtatttttttatgttatttagattgtgggttaaagtaaaatgtttagatgtggaatgtggtgttgttataatttaaagaggtttattaagtagtgtgtttttttgtttttggtgaggatgtaagatgtaatagttttttttttattttggaggggatatatttgtatttttttaaatatttggtatttgtttatttataaaattttattttagtgtttatttttgaagttgtataaggtttatttttattttgtggggtgcgtgtgttttgtaaaggattatagtgtattttttttttgttgtttatttattttagttaatatgaagttgttaatgaaatgtgttgatttaatattttaaaggatatgtagtatgtttagtatagttttaagtttatattatagagggtataggtgttataatagttttgaggtaaataataaataaatgtgtcgttgattttatatgaatgtgaattattttatatttttttttttttttttttttttttttttttttttttttgataaagttttgtttttgttttttaggttggagtgtaatggcgtgatttcggtttattgtaatttttgttttttgtgtttaagtgatttttttgttttggtttttcgagtagttgggattataggtatttgatatgatgtttggttaatttttgtatttttaatagagacggggttttgttatgttggttaggatggtttagaatttttgattttaggtaatttatcggtttcggttttttaaagttgggattataggtatgagttattgcgtttagtttatatttattttttaattggaatggaaaggaatgtatttattaaatttatagcggtatattgtgtgttcggggttttattaatttgttttattagtgataattagataatataaaagttgtaattataatttttatttggttagatttggagtaattttatttattttttaggttttattagttttttttagggataggttgttggattatatagagataatagatagttttaatattattttatattttttagttttttaatgttggtgcgattttataatatttttagtgttttttataagatttattttgggatatattatggtttttgatttggttaggatgtgggtagtgttagaggttttcgtttggtttttagtataatgagagtttttattttatagattagggatttagtgtgggggtgattttatttagtagtgtagtagtgttaattatgtatttagggaattgaaagatatttagcgttgggtttgttggtttagtggttttattgtgggttataatttgtttaggtttattttttggtttttataagttttattgtgatgggagatatgagtgttgtgggtatttgggtattaatgttagtttatatttagtgttaataatttttttagttttgcgtgttttttttttttagtgtataattatttaagtaaatgtttataggtttttttgttaaatgattgagggaattgtgttagtatatatttttatagggttgtagggttttttttttagggatatggattttttttttgttattgagatttgaatttgaattttggttgaggtttaggtattgaggatgggattatgattttgtattgggttaaatatttttatttttttgttttttaatttttttatttttattatagatattaagtagcgtttttgttggttgtttgttttaattttgggatattattttttattaattttttttatattttttgtaatttgagtttttttggttgttattttgaagttgttatagtaattatgttttttgtttttttaggttattgttattattttttttttgtttttttagggttatattttttttagggatatggataaatgtaattttgggattatttttattattattattcgtagtttgtagaggataatatttttatatttagtgatgtaggttttttttattattatgtttttgaggttttggtggaaggttgtgttttttgggtttttttgtggagtatggttttggtgggtttttattatgtttattttttttagtttcgttatttttttttttatatgtattagggtaattaagatatgtttattttgttgagagttgggtatttttttttttaatttatatggatttattttagcggtgggtttagttttatttattaaagttttggggtgtttgataaatttatgttttgagaaagtgtttttaagttaaaggatttttatttatttagtttgaaattttggttttttgattaaacgtttttaaattttaattttagaagtgttttttgggtttttgtggggaaatggcggttaatttttgtaaagttgttgagtaggattttcgtagaattacgggggtgaggtttttgtagtattttttagcgtaggaagtgggaattattattagataatggtgagttttttttgtatttttagagggttttggagggtatttatcggatattttggttttagtttttagaattttaggtttttttattaggattttgatttttttgtaataggtttgttttggttgagtgttagatatgtttggagtattgtggttttcgtaatgatgtttttagttgttattttacgttatttgttttttcgttataggagataaaggtttttttatgagatattgtagaggttgttatttgtagttagtgatagttgttaataattcgtagatttttatgatttttttatagggtattaacgtagttaagtagtaattatttaatttttttgtttttgtaggttttttttaattttattattattgtgtagggtattttattattttatttgttatagttttttttaattagggtatttttttagtttagtattgaggagattatagtattttagttgtattttatgttatggattttttgtgttttttattaattcgggtggtatttttttggtttgttaggtagtgggtaagattattttaaatttttatttttgtttgtttttatgggttattttttatatcgtttgggttagttagggttttttgaggagtagagtttaatacggtagtaaatgtgtaaggatttatttagggaaatatttgtgagagaaatttaggagagagatagaaaatattgggagagttattagattatattgtaattttgagttttagtgaaggagagagggtaggaagtttagttggaagtattttagattttgtgtaggttaagggaaatttagtaaaggaggtagggagttttggggttgtagttagtttttagaggagaaatatttttgttttagtttttgttttgttttttttaattattggttggaaaagattagggggtaggtgtgggattagagtaaatgtggtaatagattttaagttttaagagttggggttattatcgattttgttttttgtagttgaggggttgggatgtgtatttttatgattgttataatgatttagtggggagagagggaaaaagttgatgataaagataaaaaaagatattagttgatgaattgataattttaagtagatgagaagggatgatgtttggggtattagaagagggattggttttgattgggagtagaattgttaatttttagtaatttttttcgtggtaaaatgtttgatatgtggtgtagttgtaaatgtatgagtagatagtggtggaatcggggaagttgttttttaatgtgtttagtttttttagtgaggtaggaggtaaggttgttagttgaggtaagaatggggaagaagggttggatgtgtgagtatagagagaaggtgtttaggagttatttaggttaagaggaggttgagggtgaattacgtagggagagggtgattgttggttacgttaatggtaggggttttttatgaggtttggaattttaaagagattagttagtatgttgtgtgttgttgtttagttttttgtagtttatggggtaggtgtagtatagatagaggtggaatttattagttgtgtagttttgttaggtgagtatgataatgtaagggagaggtaagggagggattgaaattatttattgtagaatttaaaatgggagaagagggaggagaggatattaagggtgagtgatagggagtagatggtaggattatttaattgggaattttagtgggttggaaggattgttggaattgatgtattatagggtggattttaagtttggaatgtaggtatataggaaatgagtggtttattgatattatattatagtatatgataaaatgatagtgtttgtgttattagagtttgtggttattttgtaaggggatgagtggaaagatggttagagagtgggaagtgtgagattgagagtatggaagggttggggtttttggtcgtgatgaggtttaggggatgataagggtatgagatttaggtagagagaggagaaggttatggaggagaggagttataggatttgagagtttagggagtaagggtattttttttgttgtataggtgtttgttgttgttataaaaattattataaattaagtggttttaaatagtatttaattattatgttatagttatgtgggttgtaagtttatatagttttatggggttaagattaatgtacgggaaggtttgtatttttttttggagattggggaagaatttatttttaagtttatttaagtttttgtttgaatttatttttttgtagatagaatagagatttttatttttttgttaagagttatttttagtttttagagtttttttttaggtatttatatatggcgtttaaggtatatttagtttttttgtttggaacgtttgattttttttttttagttttttttttgtttttttttttgtagaatttgattttagttagggtagtttttttgtttttaatggtttatgtgatttgattgggtttacgtagatagtttaggatattttttttattttaaggtttttaatttttattatatgattaatgttttttttgttatgtaatgtaatttatttatatgttttaacgattaagtttggatatttttggggattattatttagtttattatatttgcgtatgttgaagttattaagagttaaggagacgtattgttggagagggtgatagtgaattaggagttataagggttaggattaagaggaatggtttggggtataaagggaatggttataatatggggaatggggttttaatttgttgatagtttaggggtttagggaggagggagggagaaaggtgtgagaattatagtgaggagtaaggattttattttatttttgaatttaggggtataagtttttgggaaaatttttttatgtgggaggattttggagggggtcgtgtttttagggagattaggttgttgttgtagttgtgaggtgtaggaatattttgagagagggtgtggaggttttgttaatttttttgttgggggagggttttgttttagtgttgattattggttgattaggagggtggttgttaaaggttgttgtggtaatttttttagatatgataataaagtttgtggtatggattgtaaatcgggaattagtatttaagtaaggttaatatgagtttttaagttaggtggatttgaatatgaattttttaggtttttttattagttagttatagagttttgggtatatttggtttatagttggttttgatagatatttgtttagtgagtgagtgttgaatgagtttatacgagttagtttttttatttgtaaattagtgatgtaatttttgttttgttaatttagaagaataagtgagaagaaatttagtgttaagaaaaatagatataagatttgtggaaggttgggtattagtgttttaaagtaagttttgtttaaattggtaggattattttttatattagaaataggaattggtttggattttgtttgggattaggttgagagggaggtggaggtagtagagtagggtaggggtggggtttatgtagtattaggtgttgaagtaaagttaaggtttggagggagcgaatttttggtgttttttaggtaatttagattgttttttgttttagttattatggtttttttttttttaggatttttcggtgttgttgtttttatttttttttgtttttttggtttttagttttttaggatttataaagatgttgttttgaaaattttaaggtaagcgtggaagagtagaatagttttagggatagtgggaagatgaggttattttagtatgttgacggatattaagggtgggggtggaggacgtgaaggggattagtataggagttaggggaaattttttaaattttattttgtattatttttatttttgtagttttttgtttagttttagttttgagtttttagtttttttttaattatattttagtttagattttagggttttttttttttattttttttagagtagtatagtttatagagtttttgaatagaaatttttttttatttaatagttaattattttttagcggagagggatagtcggttttttttttttagtgattttatatttttgtttaaggtatttagttatattttttgagttagggatttttatttgttttttagaggtttatgtttaagataaggggttttttgggttttttagtataggaggttttaagttaatgggttagaaaaagggaaagggaggtagaattttttatttatagttagattttgtaatataggttttaagggttttagttttttgttttggttgatgttttttttattatttttttttattagggttatgagtttttaatatagttgagttggtttaagttgaggagttgttggagttggattaggttttgttggaagggtaggagggggttaggggtttaggttttggtgtttaaggtttagaatttgaaggaatagatgaggaggtattaagaaagtttgggtggagatatttaagttttttattagtgtttatagtattttttatttttggaaatattgcgtattatttattaggagttttaggattagaaatattttagttttttttaggttagataaagtagaagagattttaataaagggtcggaaataggtaggtagttggggagttagggttttgtagttcgtttttttttgattttatagtagggtatttaggttttataggaatttattttggattatgttttaaaataattttattttaaatataataaagggagagagtatttatatataatgtagatgtatttgtgttttatgtttagttatattaaaaattttgacgattaggaatgatggttcgggagtggtgttgatgtagaagaggaaagttagggggtggtggaggttgttaggtgtgggggtagtagggttttttttatttatattttgttgtttttttttgaagggtagatggttatattttagaatgagcgagttttttattgtatttgtttaattgagaaggagatatggtatagtgagaataaggtatgaaaggataaagtaaggtaggaatatatagtatatatgtagatgttggtgtattgtttgggtttagaggatggatttgggcgtggtggaagagatgtaatatgagaaaaggtatagattttatatagagggtagtaaaacgttttaatatagtattaacggttagggggtatgaagtagttaattgtttattatgcgttaagtgtttatgatttatatgatgggattgaagatatagtaaggaatagggaggaattaagggttttatgaaattagtatttattgtggaggagacgtttgttttagtaggtagtttttaatattgaatttaaagtgatgttgtttattattgaggattttggtataatttttattcgatataagttttgttttaaattagtttgttttagttatttggaaggagatagaggttaggattagaagattttaaagagggaagatagttagagggaggaatgaagaagtgaagtgtgaaaagatatagaaaataagtgggtgggagagtgggtgtttttttgtgtatggagtttatttgatttacgtaggttttagaatttttaggtatgttataggtaaaggtagtgtttatttgttttatgtttatgtttgggtaaaatagggttggtagttaaagaattggtttttaaaaattttttggggttatttttagataagtatagaagagtaaaaattgttagttatttgaggtgtatttttttttttaggtttagaaatgaattatatgtaaaaggaattaaaggttgtaatttttatggtatttagaaaattggattagggatttggagagttatgtgtttgttattgttttattatttacgagttgtgtgattttaggagaagttttttatttatagggtttttgatttatttgtgaattatggataaatgtttttattttagtaattttattgaaatgtagggaggattaagtgattaatgcggaggaaaaaagtaaagtgatgatatttatttttagataagattttttaggaaaatgtattttaaaaggaggagaaaatatagtatttgttattttttgttaaaaagtttttttggtttagtaattatgattgtttattatttttttataaaattagggtaaaattagtttatttaatgttttaaataaattaaatatagtttgtgattttatgtttataatttttgtattgtgtgaaattgaaaagaaatgggaatatatttatgtttgtgtggtggttaggagatttataaaggtttggaaatgattttgtattatttattttttattgatttattttatgttttggaattttaggtaatttatatttttaaaaagttttatgtttatatataggatagagtagaaaaggtaatatttttgttttaatttgttagggttattataataaagtattatatgttgggtgagtaaaataataaatatgtattgttttatagttttggaggttataggtgtaggttaaggtgttgtagggttgtttttttttgaggtttttttttttggtttgtagatggttatttttgtttttttaatataggattttaatatatgaatttcggttggggagggatataattcgttttataatagcgtggattatttttggtagtggatattttaaaaaataaaagagagtatatttttttggtttggtgtttttttttggtttttttaatttttggttttgtaataagaataaaaaagaataagaattaacgtttagttttttttagaaggtgaattttttttatatttgggtaattttagattttaagaagaggtgttatgtagttttttagagttttattttttttaggaattttgtttttgtttttttaattggggagaagatttttttaggagagttattttttttgatgttgtatgggttttattttgtttgaatttataaagtggattttaataaaaaggaaatatttgttaatttttattatggttatatttttgtattttttaaaatgttttatattgtgttgagtttattttaaaaatattttttaaaggtaatatataatattttatatgtttatggggtatatgtgattatttgatatatatatagaatgtggaataattaagttagggtgtttagggaatttattattttaagtatgtattatttttttgtgttgggaatatttaaaatttatttttttagttgttttaaatatatataattgttagttttagttggtttgttgtgttatagaatattagaattttttttttttatataattgtatatttgtatttattaatttatttttttatatttttttatttttatattttttttaatttttggtaatttttattttatttttaatttttatgagattaacgtttttagtttatatatgtgagtgataatatgtgatatttgtgtttttttgtttggtttattttatttaatatgatttttggttttatttatgttgttgtaattgataggattttattttttttttatggttgaattgtattttattgtgtatatattatagttattttatttatttatttattgataaatttattattgattttatatttttgttattgtgaatagtgttttaataaatatgggtgtgtaggtatttttttgatatattgattttattttttttggataaatatttagaagtagaattgttgtattagatagtagttttattaatagttttagtttttttgagagattattttattgttttttataatggttgtattaatttatatgattattaatagtgtataatatttttttttttttatatgtttattaatatttattattttttattttttaataatagttattttaattagggttagggtaagatatattttattgtagtttgatttttatttttttggtatttagtgatgttgggtgttttttatatatttgttggttatttgtatgtttttttttggggaatgtttatttagattttttgtttattttttaattggattatttgtattttttattgttaagtttttgagttttttgtatattttagatattagtttagaatatattaattggatgaatatattggttggttgaatatttagtaaatatttttacgatttaataggttattgttttattttgttggatgttttttttgttgtgtagaagttttttagtttaatatagttttatttgtttatttttattttttttgtttgtgttttagaggttttagttataaaatttttgtttagattaatgttttttataagtttttttttagtagttttatagtattgggttttacgtttaagtttataattttttttgagttgattttttgtatatggtgagagataggggtttagttatatttttttgtatttggtagtatttttttagtattatttatttaagagattgttttttttttagtgtatatttttggtttttttgttagaggaatttttttgagagtttttattaagaagtaatgtttagttttattaaatgttttttttgtatttattgagatgataatatggtttatgttttttattttgttgatgcggtatatgatatattttgatttatatatgttaaataatttttgtattttgggtataaaatttacgtgattatggtgtattgttttgatttgttgttggattttgttgttaatatttttaattattattttttattattaacgtttaaatttttattgtaagtattttaaatttgtaaaatttatatatattgaaatgattagatttgtattaaatttattaatgaattttgataaatatagttatagtatttatgttattatgaagatatacgaagttttttatttttttgtttttaaattagttttttttttttagtagttattgatttgatgattattatgatagagtagttttttttgttttaaaattttatacgtatttatttattttatatggttttttttgtgtttagttttttgtatttggtgtaatatttatgtggtttgtttagtttgttgtatgtattagtaatttatttatttttaatgttggtagtattgtattgtattattgagttataatttttttgtatattttgggggtatttacggttttttattgttataaatgaattatggatattattgtatagggatttttggatataatttttattttatttgagtaaatatttaggagtggaaatgttagttatagagtattagtttgtttaattttattagatgatataaaagtgatttttagagtggttgttttatatttttataggtagtggatgagattgttttatatttttgataatatttatatttattaattatttaaattttagttattttaataagtgtttagtggtttttcgttgtggttttattttgtatttttttttgatgattattggttatttatgtgttttttttgtaatgttttagaagatttttttaaagattgtggaaggagttaaataaatatgatttttttttttttaagtgttagatttaaagcggaatgtttagaatttatttacgttttttagtttggtttatttaattttatatttgttttttaaagtttttatttttttattttttttttatattttattttttttattttggtttaagtttatatttttttaggaagtttgttattgtgaaggttattgatatgtttagtattgttatttttttatttgtttgtatttttgtgtagttttttttatatttaataattttttttttattttgtttagtttttgtggatttattttataaatattaatttaaagtagttttagttggaagaaagaatagaaaattataaaaaatttttgtgaaggtattatttaggtttgttaattggcgatattttaatattattggttatatgtagtatatatagaaaaataatagaaatatatgtagatagttttgattttttatagttttgatatgtatatgttttagttagtattgtattgagtaaattaagaattgtaagaggatgtgtgatttgaatttagtgtatgtttttatatttttattaagttttaggaaatttttttgtttgaagttttttagatttgtttttttagaataggtttttttattttgttatttaggtttgagtgtagtggtataaatatagtttattgtattttaattttttaggtttaagtgatatatttattttagttatttaagtagttgggggtatagttatgttttattatgtcgggttaatttttgtattttttggagagagggtttttgttatgttttttaggttggttttgaatttttgaatttaagcgatttatttattatgattttttaaagtgttaggattataagtgtatattattttgtttggttttgtttttagattttttataaattgtttttggttaattttattatttatttgtttgtttttttagttaatatgttttatgatatgaatttatgtttatataaatagtttatttgtttttattggtggatagtattttatgggaggaatatattataatttttttttttttttttttattgatttttagattttttttattgtagattttattgtaatgaatattttgggatattgttttttgtttttagagatatgtgagtttttttagaatatgtatataggagtggggttattatagtttttttatatgatgttatatgatgtaaaattgttttttgaaagaaataatttaaatgtttattaagagggggttgattaaaaagtatcgtatttaaaagaagtaatttttatttttttttaaaatattgtatatatatataatggtgtattatgaaaattttaaataaagatgtagttaagtttttggtatttttttatgtgatggtttttgtgatataatgtgaagggaaaaggtaaggtgtaggaaagtatatgtagtttgttaaaatttgtgtgaaatgggagaaagattatatatatatatatttagattgatttgtatatgtataaaatgtttttgaaagaataagtaagaaattgatataaatagttgtttgttaagatggggtagtataagagagagatttttaattttttgagttttgagttaagttaaaatataaaataaaagataattttaaggtagataaaataaataaaattaaattttttaaaataaaaaatttaaaaaaagagtttaatagaattaatttttttattttttttaattaaaaaaaaaaattgtttaaaaattatattattttttaaataaggatgttttttgttattttaatttagtatgttgtttttttttttattgtattatttttttttatgtgtgtgtttgttttttatttattaaaagttaaaatgagagtatggttatttaataaatgtaatcggtttggtgaaggaaattttgattaaattttgatgtaaatggtgaagtttaatttataaggaattttacggggtttaatgtattaattgtggttttagtaggtttagaattttttttattgtttatgtgagtttaagtatgtgatatttagaaaagagaatatttggtaatttttttggaaaatatacgattgaatttatttgttgaatttggaaggtttttattatgagtttattttaagtatgtgttatatgaggttattttgtatttggattagaaggtatagttagagtttatattttaggtttaaatagtttaggatagtagagtaagattcgtaggttagttttataaggggtgggaaggattgggggtgtgggggttatttgtgaagtagtgggaattttagatgttgtgtgaagtttagtttttggattgttttgtaattttatatttgatttttttttgggtgtttgttattttcgggattttaaggaaattaaatgttgtagatttgggtggggtgttttttaagatggtttatgtatggtttagtttattttatatttttgtttgttagtttttttttgatattagaaattaatatggattgttttagggtggtgatttttaaagtgtgtttttgggataagtagtattggtattatttgaggatttgttagaaatgtaatttttaggttttgttttagatttattgaattagaaattgtattttaacgggtttttagtagaattttgtattttaaattaggtttttttttttttgttttaagatttaatattgagtagttgtgatttttggatagttatatatgggatatatttttttgttaggaagtatttggttttttagttagtttagtttgagttttggtttggtttaggagagaaaaatttatgttttgggttttgagtaatgtttttttgttttggatgtttgttagatttttatttatattttaaaacgtagtttaaatgttgtgttttatgaagtttttgtgattttttggttagagtagatggtttatatgtgtattcgtaaagtaagttgtatattttgttaattatttgtgtaagaatttttttattggtaatagagtgagattttgtttaaaaaaataaatgaataaataaataaataaataaataaataaataaataaagagtttttttattgatttttgtttgagtaagacggtttaattttgaaggtaaggggggtttggttttttttattttagttttagtttttttaatataatgtttagtatatggtaggtgtttgataaatgtttattaaatgaagggattttttgtaatgatttaggagataagaaggtggaataaaagtttataagttaaaagtgggtgggaaaaggttttttaaattttagtgttgtgtgagtatagggtttattgatgtttatttttagaagttttttatttattttgttttttttttattagaaatatttatgtttttttattaaggtttatttaatcgtattttattttttaggattattttttaaattagttgggtataaattttatagtaattttttgttttagttttaaatatttagttgtaggtttggtgtggggttttatgttaattttagtattttgggaggtcggggtagtagattatttgagtttaggttttagagattagtttgggtaatatggtataattttatttttataaaaaatataaaatattagttggggtttgtggcgtttatttttagtgatagttatttaggagtttgaggtgggaggatttttggggtcgaggagttcgaggttgtagtaagtcgtgattatgttattgtattttagtttggatgatagagtaagattttatgtttaataaataaaaattataattttgaggttaatttggtgggagttaagagtttattttattgcggtgttattatgagtgatattgggtggttttaagattagggggtgtttatatttttaaaaagaaaattgttttataaagaatgtaaagttttggtgtgtgtaggggtggggtttttaggagaaaaaaggtaatagttttagtaatatttagtagttgattgttttgtttattttttatttagagtttaggtaggggttggatttttattttagtttttttttagcgtattttggatgtggatggttttttagtgtgaatttatttgggttttgattgtggttgttttttttattgttatggagttttagtgggtgtggcgtatgtagggggtttgtttaggagattaagtgttttttaagttttaagatttatatttttgaagtatttatgttagatgtttaggatggaagggatttagatgtttaaattataataaaagaaagaatttattttatttttttaggtgtggtggaattaaaattaaatgataattagtaatttaaaatgattatatttttagtgttgattttattatttagtcgacgtttataatttagggatggatgaggtattgtggaggaagagtttattttttttttttgaaggttttattagttggagtttttgttttatgatatggagaggagattttgttttaagttaagttaggattgagtatagtggtttatttatgttattttagaatattggggaggttaaggtaggaggattatttgagtttaggagtttaagattagtttgggaagtagtgagatgtattttgtttaatttttttttttaaattagatggttattttggggtttttttgtagttttggttattttggagattgaggtagtaggattatttgaatttaggagtttaaggcggtagtgaattatgattaatttattgtattataatttgggtgagagagtaagtttttatttttaaaaaaagagaaagtgatttgagttgggataggatatttggatttttttattaaaattgtattttaaatgttgtaaaattttataattagtattttatttttttagaaagtagaatttgtttaattatagaaaatataaaaaatgtagtgaagtagaaagatggaaaatatttgtgtttttattgggaggattcggatgaatttttgtttggtagagttttagagacgttagtgaaaaggggttttggagttgtgttttgtagttgttttttgagtttttatttttggtttttgtgtatgtggtgtttgtgtaggatgatttagtgtagttatattgtatgagttattttgaattttgttttttaaattttattattattaataagtaattttatatgttattataaattttttttaaatagtattttttttggttgtatattatttttaaaaaatgatttagttattttttttttataagttttttttttttattgtaaataatatttgattaatatttttatatttaaagatttttttatattttgtattttattgtagaattatagattttttaaatataaattatttggttaaattgtatgaattttttttgttttgtttttgagatggagttttattttgttattgaggttggagtgtagtggtataatttcggtttattgtaatttttattttttagggttaagttatttttgtgttttagtttttcgagtagttaggattattggcgtgtattattatatttggttaatttttttatttttagaaaagacggggttttattatgttggttaggttggtttcgaatttttgattttaggtgatttattcgtttcggatatatatgttataaaattgtttattaaaagtagtatattaattatatttatttattatttattttttatttgttaagttttttttttgtattggtatgttttagatgttagggatataagtggtggttggataaggttttggttttaaataatatgttttagtggtatagataataatttttaaatttattttaatattagtgataattgttatggagaaaatatattcgggttagaagattggtggtggtgaggatggtaggagatatattttgttggataagaggtttttgagaatttgattaagggatatttgagtagagaatcgaatggtatgaggagtgagttatgtggatttttagggagtaagtgtatgtgggagtattagtaggggtcggtggtagagataggattgagtagtgataagagattggtgcgagtgtagatgagtgatttgggttgagagtggtgagatgaggttagaatggttagaggggtttcgtgttgaggggttaataggaaatggagagaggaagggaagaggttggagtgtttttgggatgtggtggtgaggatgggttttaatttttattcgaaaggtttattttgtttgttgtgtgggtgatggatagttgtatgagatgtagtaggtagtttagttggaaggttcgtcggatttattattttagagagaatggttttggggaggaggtagtagacgagtgtgaagtgattggttttggggttaatatattttttagatggttttagtagttatttaatagagaattatttatttatttttatagttgattttagatggtttattataataaattaaataataaatatatatgtattatttaaaaattaataaggtttggcgtagtggtttatgtttgtaattttagtattttgggaggtcgaggcgggtagattacgaggttaggagattgagattattttggttaatatagtgaaattttatttttattaaaaatatagaaattagttaagcgtggtggcgggtttttgtaattttagttattggggaggttgaggtaggagaatcgtttgaatttgagaggcggaggttgtagtgagtcgagatcgtgttattgtattttagtttgggtgatagaatgagatttttttttaaaaataataataataataaaaaaaaatagttgggaaaatatagatttaaaatattaaggttggggtaaaattagaatattatttagtaagaaggaatatttgaaatatttgtagaaatggagttgattgtttttttagttatagatttgttggtttataattgtgttgtattagggagttatagaggggggtgatagtgtaggttatttggtttttgttttttgttttaggaatatttttttgttttatatttaaagttaaagtaaatttatgtaattgtaatttgtttaaaaatgaagttaatagttaaaaagttagaaagtaaatgtataaattttaggggtttaaggatagtttatattttttttttaaaatgtttttattttgtattattgaatggagatagttttttttaggcgttttaagatgtaggggcgattgggttgtagttttatttataggtgtttttttttatatttgtagttttttttatatttgatagttaattttattgattttatttgagttaggaatttgtttttttggtattggttttatttgagttattgtgtaggtttaaaattgtgatatggaagttttgttataatggtttttttttgatggaatttgatacgtatagtggttttggtttttttgttatttttaggagagaacggagtgttttgtattttttttttaagatttttgtgtaagagtgattaagagatttggagttaggggtttttttaattttatttttttttttgatgttttttagcgtggggtttttggttttttgtatatttgattaatataattgttttagtttttgaaataaaagtataggtgtatataatattgatttttgcgtgtagtgttaaggtggggaggttttttggatgttaggtttagtattttgatttttatttacgtatatatatatatatatatatatatatttttttttatatatagatatatacgttaattgatatatataggtatatatagtcgtatatatatttatatatatatttagatatatttttatatatagatttatatatacgggtatatatatataggtatatatatatatatatatgtagtttgagtgagcgttgtgggataggttgattttaggggtggagtaataggagttttttagtttttttttagtggattttgttttttttttttggaggtggaggagattgtattttatgaggggaagttttttgaagaaggggggagatatttaggagcggggtttagagatggatagggatggagaagtggagataaagcggagggggcggggtaagaagggagtttacgaggaatggggagagggaggattttttagaggttagaaatattatacgtagaatttggttttttgtttttgtgttttattaagatggatttagtaaattagtcgaagtgtaagatatggagtttatatagtaaaggatacgttttagttttttgttagtttgaatttattagtagtagttaggagaagagtgttagaagttttgcgtggggcgcgtaacgtttttttgtagcgattttattttttgtattttacggatttttttattagggattatgttggtttttttttatttaataggaaggaaaggaagaagtttgaaggttttggattttttttagcgtattttttttcgttatttatttttagagtgtttttgttttcgtttcgttattttaattttattataataaagtatattttgcgcgttggggttagaaatttttttttggtttttgatttattggtgttattttattgtgttttgttttttcggttattgttattgggtgaagttttagagagtttgagtttggagtttaagagagttggatttttagagcgtagttgttcgtataaatatttttttttttttttggtttttattattattattattattattattattattattattattatattttaagttttagggtatatgtgtataatgtgtaggttagttatatatgtatataggtgttatgatggtgtgttgtatttattaattcgttatttagtattaggtatattttttaatgttattttttttttttttttttattttataataggttttagagtgtgatgtttttttttttgtgtttatgtgtttttattgtttagtttttatttatgagtgagaatatgtggtgtttggttttttgtttttgcgatagtttattgagaatgatgatttttaattttatttatgtttttataaaggacgtgaatttattattttttatggttgtatagtattttatggtgtatatgtgttatatttttttaatttagtttattattgttggatatttgggttggttttaagtttttgttattgtgaatagtgtcgtaataaatatacgtgtgtatgtgtttttatagtagtatgatttatagttttttgggtatatatttagtaatgggatggttgggttaaatggtatttttagttttagatttttgaggaatcgttatattgatttttataagggttgagttagtttatagttttattaatagtgtaaaagtgtttttatttttttatattttttttagtatttgttgttttttgattttttaatgattgttattttaattggtgtgagatggtattttattgtggttttgatttgtatttttttgatggttagtgatgatgagtatttttttatgtgttttttggttgtataaatgtttttttttgagaagcgtttgtttatattttttgtttattttttgatggggttgtttgttttttttttgtatatttgttggagtttattgtagattttggatattagttttttgttagatgagtagattgtaaaaatttttttttatgttgtaggttgtttgtttattttgatggtagttttttttgttgtgtagaagttttttagtttaattagattttatttgttaattttggtttttgttgttattgtttttggtgttttagatatgaagtttttgtttatgtttatgttttgaatggtaatgtttaggtttttttttagggtttttatggttttaggtttgacgtttaagtttttaatttattttgaattaatttttgtataatatgtaaggaagggatttagttttagttttttatatagggatagttagtttttttagtattatttattaaatagggaattttttttttattgtttgttttttttaggtttgttaaagattagatagttgtagatatgtggtgttatttttgagggttttgttttgttttattgatttatatttttgttttggtattagtattatgtttttttggttattgtagttttgtagtatagtttgaagttaggtaacgtgatgtttttagttttgtttttttggtttaggattgatttggtgatgtaggtttttttttggttttatatgaattttaaagtagttttttttaattttgtgaagaaagttattggtagtttgatggggatggtattgaatttataaattagtttgggtagtatggttatttttacgatattgattttttttatttattagtatggaatgtttttttatataaatatttttgagatttttttagatttgaaagttagtttgagtttttagatttgtttttgagttttagattttggttttgggaaaaaggaaattagtattttaggaataagatttttttcgattttgttttaatttaaagacgttatagtagcgtagtttttaaacgtgttttgaaaataaatgggatagtgtgtttatattggattttgtttttttttttttattatagttcgttttttttgtaaaattgttatatatttttttattgtattaaaaacggttttattaaagatattttgagaaagatttaatgatatgaaaatatgaagtttttttaaaagagagtttttggagttgggttttaattaatattttggtttttaaaattttgtaattatttgggtgtgtggtttatttttataatatttttaaataaatatttttttttaattattatataaatttaagtttattatttttatttttaaattttatttatttatttttgagataagattttttgttgttatttaggttggagtgtagtggtgagattatagtttattgtagtttcgaatttttgggtttaagttattttttagtttttagagttgggattataggtttgagttatcgcgtttggttaaaatttaagtttattttgtaatataaaattttaatattttagagaaggtgaaagttataacgttattttagtttttggggtttttgttaaaattttggggaataattttttatgtttttttttatttaaaatatatattatgtaagtggtattattggtattataattttatatattttcgtttttttaaaaatggataaaagtaggttgggtatagatttttttataataatatttataaatttatttttttttttttaaggattgcgtggaattttatcgcgtggttattttttaggggattatggaaatgttatttttttatttttattgtggtagtggatatgtgggtgtgtaaaatagttaagtagtataatttaatgagttgtgtattttaaatagatatattgattgtgtgtaaagtatgttttaataatggtttaaaaatattattttatttgagatttgtattttgattttgtaaaataaaataaaatttttgtttttgtatttacgagatgtattttggtatatttggaggtagaagtttatgttttttgtagtttgatttcgtaggttttgaaataagaataataagtcgtatatttatagatttatatatagagaaaaaaaagttttggtaaaaatgtttataaataataaaattagataaagggtaaaaataaaattagaaataataaaattatattttttagatattatttttatttttatttttttttttttttttttttttttttttttttttttttcgaaatgtttttttattttttttttttttttttattttttgtatttgatttttatgtattttagtttcgaggtaaatatacgttatcgcgttcgtttggggtaggttagggaagggacgcgaggtagtcgtgttttcgtattttgtgagcggtagcgttttgggtttcgttgattttgtgttattttagtgattttcgttttagtttttgacggggttatattcggggtgtaaattaggatttttattgaaggcgcgcgattttgagaggtttttttttggttttttagttgtgagtttttttgcgggcggcggagttcgtttttattagaatcgtttagaggtcggcgttgtttttttggggtgacggagtagttggaagcgttttcggattttggaattagtgggcggttcgtgggaggggttgaggcgtagttttttgtttattcggtttcgaatttatcgcggtgttgttttaagcgagttagattttagatcgcgttttagttcggattcggaatttttgtttcgcgggtttgtatttttatagcggtaggtgtgagtgtcgcgtagttggagattagaagtttgaaggtagttcggttttttttagtttatagcgtcgttatttcgtttttatattagtaaatatttgttatttttcgtagattagggcgggatgatgggtgattttcgttttcgtagtgaatttcgggtcgtagttttgagaacgcgttcgggcgtttagcgtagtcgcgttttgagttatatacgcgatcgcgttgggttttttttttttttttttcggatttagtagtggcgtttatagtttgcgaggagaaaattatttttgtgttggtaagtttaggaatttaaggcgagtgttgagggagaaaacgtagttgatggtttagagtagaaggagttggaggtagggtagagggggagggttttggatagaaaagatttgggagatttggttggggaggggtagttaggtttagattttggggagcgatttatttaaagtttaagattattattgttttttttattttagaaagggagggattggttttatgttttgtcgcgattatttttaaatgcgttggaataaattttgtatattattattattagtattatcgttattgaagtattaaaagtttttttgggggtgagttgaatgagattttttgttggaattggtatagggagaaaaagttttcgagagagtgtagatattgtggagggaagagtttgggattagtgttaggagagttgggtttatttttttttttgttttttattatttttgtgatttttagtagtgtaaataatttttttaaggtggggataagattttagtttttgttgtgtttaataaatgataatgttcgaaataaataattagtgaatgtggatgggaaaattaagtaattgttaaaattttgtggtgtatgatatttttatttatagaaaagtgtaggttaggggttttggggaatggttagtaattataggtagagttttattggaaaaaaaaatgttcgtaaagttgacgaagatggaagggatatagttcgtgattatggatggtttattgtttaatgggggttggtattagatggtaaatgatagttggacgtggtggtattcgtttgtagttttaattatttaggaggttgaggtggtaggattgttttagttttcggttagagcgggagcggtttggcgtttttggggggttcgaatgggtcgtagcgagcgcgatgcggtcgcggcggggtttaggtgcgatgtgtagcgaggtgcgggagttggacgttgtcggttgtcgttattttttagttttgttttttagtttttttttagtttttttcgggatcgcgtattattcgttttttgtattttttggtttttttttgtatttgttttttttatttttttttcgtttttttttatttttcggataaattagtttttttgaagtttttgggtttttgggttgtttttgtgaatggtattcgagggtttttttagttttgtcgttgaggtagttatatttttcggtgtttagagcggttttcgggtttttgaagttttgttttttttttggagttcgcgtgtttttagttttagggcgggtcgtagtttttggagttggggttttttttttttcgggattaggagttggtgttttttattgttgtggggattatggggtttttgatttttaagttgaggggttggagtttgtcggttttaggtagaggattttttttgcgattgtttttatttttagtttattattttttcgtttttcgtttttagggtttttttttttttgttaatttttttagttattgtggattttaatgatttaaggatattaagtttttttttatttttttagtttttttttttatggttttttgggttttgttgttttttttgttttttgttatttttttttatttgtagttttttgatttatttgtagggtgttttttgtttttattttttgttttcgttttttttgttttttttatgggttttttttataagtagtttttatttagtgttgtttttatgtttttttatttttagttgtttttgattttaattttttggtgttgttttttgttaggggagttttttttttattttatttttttttaggttatttaaggggagttttggtgttaatgaaagttgggttttaggtagggcgtagggtagcgtagatgttttttttttttagtgtagatgtttgttttgggttttgttttaggtgattcgttttttatttttttatttttagttttatttttttgaggattttattttgaaatttttaggtgttggattatttttttttggtttttttgtttttttttgttttgggattttatgttgtttttattttttgattagttgttttgggtttttagtaagtttttattttttttaaattttatttttttttagataatttttttttttttgtttttattttattttaagtttttttagggttattttttttttttttttatgttattttttagtttttgttttgtttatttttttatttttatttagatttaaaataggttttagtttaacggttttttgatttttattttttttcggttttttgatttcggtgggttgttagtttttagattttatatttaaaatttttatttattatatagtgggttgtggttatttttttttttgggtttttttttagtattattttttttttgtgagggttttttaatttgagtttttttttggagtgtgattgtttcgtttttagtattatttttttttgaaggtttttttttaggttttggtttttttttttttgaataggattttagtttttttttaattttatattattgtttggtatattgtgataattttttttttgttgtttaattgtcgtaaaatatatatataaagtttattatttttattatttaaaagtgtatagtttagtggtattaagtatatttatatttttgtgtattttgaaattttgtgtttattaaatagtagttttttatttttttttttttttggtcgttggaattattggttttattttttgtttttatgaatttggttattgggaattatgttgttatgaatatgagtgtttaaatatttttttaatgtttttgtttttattttttttgggtaaatatttagatgtagaatttttggattatatagtaattaattttttagtttttggaggaagtaatatattgatttttatagtaggtgttttattttgttttttttaatgtattatataaacgttttagtttttttatttttttgttaaatttgttttttttttttttttgtgtgtgtgcgtgtgtgtgtgtgtgtgtttgattatagttattttaattggtgtgaagtagtagtttattgtagttttgatttgtatttttttaataattatagatgttgagtatttttttatgtgtttattggttatttgtatgttttttttagagaattggttatttaaattttttgtttatatagtttttttgagttttatgtttgtgttataggaattttttatgtattttggatattaattttttattagataaatgatttgtaaatatttttttttattttaatggttgtttttttattttgtagattgtgttttttaatgtttaattttttttattttgatgggtttaatttattaattttttttttgttgtttgtgttttggtgttatatttataaaagtgttgttaaaatttatgttatgaagattatttttaatgttttattttaagaattttttagttttagtttttgagtgtaggtttttgatttatttagagttaatttgtatatgtggtataagttaggagtttaattttatttttttttgtatgtgaatgtcgtttttttggtattgttttttgaaaagatgtattgatttttttttatttttattttgtatatgatgagttttttttaaaggtagcggttcgtgattttattttatttttatttgtgtagtatagttatgttggttatgggtttttttgagtttgggtttttttttatttttatttttttttttggtaagattttttttttattattgttttcgtgttttttttttattattgtagggtagtttttttttttggttttttttttatatttttaggtggtttgtggttattttgttttggtagttggtttatatgtttgttatttttattttttttttttttgttttttagtttgtttttttatttttttgtttttttagttttttttgtatttgaaatttttatttttgtttttttgtatatgtatattttttgtttttttagaaaggttgagatagtagatttgtgtgttaaatattaatgtgaagttatttttaggaagaagttttatttgtggttttttgttttttagggttttatagtttttattataattttacggtgttgttttgggatggatttgtgtagttagggttttttgttgagggatatttggatggttagttttttttgttttttaataggtagaaaggtagggttgggtttcggggatagtgggtagaagtagttttgggagttgagatttgggatatagagattgaggatttgatagagaatgggtaggattttagaagggttttggtatatattaagggatagaagggaggtgagagttggtagtaggtaagagtgatgggaggttttttttaggagagttgggggtagagagtagggatttgtttgtttttattagatttggttgggggtaggggtgaggaataggggttagtagagttcggcggggaggtaatttggtatttagtttatatagaaaggtatggaggagggttagggaggggttttttttggtttgagttttttatttggaattgttgggtgggggtagttttgtattttttttaggagattaggggttgtgagattaggaagttagtagtattaggggttttaggtatttttatttttatgggtagtttttttttttttttaatttggagatttaggaatggatagtattttagttttttagaatttagatttttgttatgaatattataaatttttagaaggaagatgttatgtcggttgagatatatttttattttatatgggtagattgtaggtagaaattatagtagtatttggaaatttgtgtgggtgttaggagagtaggtattgggtttgggtaggggttttttttttttttattttattagagttatttcgatttttaattttgtttagggaaattttttttgtgttatggatgtatgtgttttttgttggtgtgttatattttgattttttttttttgttagagttattggaaaaagataatgggttagggattgaagggtttagtgttataatttggggaagtagggggttttttgatagaagtttgaatcgggtgggtgttaggtaggagaggaagtttttagggttaaggttgttttatttgttttttagtttgtttattttaaagagttttttttggttttatgtattaggagtttatttttgatatttttttttttagtattaatgtagggattttagagtataaagatatagtttcgaggtttatttttttgttagttttgaggaattggtttttagggtgaggatagatttgtagaaggtttggggttcgtgaggatttttgttagagtcggagtagtggagcggattagttttgttttttgtatttttattagaggggagtagggtttggttatgtgttttattgtttttgtttttttttttttagttttttttttttttattatgagtgtggtttgtagtgaggttttggagggtaatattattttgatatgttgggttttggtttgtatttttagaatatttttttgatttggtgataggatggggcgtttttgagttaggatgttcggtagttttggggtgttttgtttaatgggatgggatttattagatagaggtggtttgtaggattttttaaggagaggagtagagggttatttgttttatgggatatagtaggaattatagtatttattttgtgttttttagtgaaattgggattatttttgagggttttaatataaggaggattaggttagggtgggggtagtaggaacggttgtggttgtgggtgtttagtgtgtaataggttattttttttagggatggttttggtgttttagagttgatgattagttattttatatgttgttgttgttgttgtttttattattattagtattattagtagtattattattttttgtgttttttgatgtaagaagaagataatattaggtgtagagggtttaggtgagaaaaggggatagttgttagagatgggagggtttttgtttgggttgtagtgtttttttatattttttgtgtagataggtttgtaggtgataaggtttttggaataggcgatgaaagttggggtatttgggaggggaatgagagttacgttgttatttatatttttgtgagaaagaaatttatttatttaaatttaaagaatagatttagagatttagagaatagcgaaagagagatttttaatgatagttttgtaagattaggtgtttggagtgtaggtatatttgggatagttttaataaattattttttttttagtgtgtaagttttttttttaattttttattagttgagtattacggggttatagtttttttgggtatcgtttattggtagttgtattaagattttaagtatgttttttagggtttttttgttgtattttttgttgtattttgttgtagttatttataatatatggcgattgttttaagattttgagtatttgatttatggttttagtgattgtatttaggtgatggtaagttagtttaaattaaattttttgatgaggtggggaggggggttattgagggggttttgattagtaggtttttggatattgggttaaagggaaagtaggaaggaggggattgtggtttagtatattttgtttttttatttttttgtttttatgtggtttgtttaaatatattttaaggtatttatgaaaatgaattttttttatatgtaggttattttttatatttattttttttttttttttttattttttttggttttatttttatttatatatttttgtttattaattgttttggaagttttttattttttttattataggaggagaagtttagtttggtttttaataatagtaagttattttgttgggatattaggggtatttgtttattaatagttgttttaattaatttttgtgttaaataaattttttatataaggtatgatataatattttatggttgttaagattttagttataattacgagagatgtaagaattgaaggtattatttttttttattttttaaattaattttttaattagttagtaaaaaggttatttatttttgtgttttttgttagttcgttgattagagttgttagtttttgttatttttttatgatggttttatttggggtagtattgttgtgaatggaagtgttatattttttatttagtatattatatatattatttttttttgttaatattatgtttagtgtaattttgtttttttaagttatttagttagtggtatttagttgtttggttatttttttaagggtattttgcgtgtaattgatgaatttttgttgattataagatatgtaattaatttaatttatatttttgttaatagttgattattagaaaagtgttgatttaaatttagtaggtatttggtttcgtgttttaaatttattaggtatttttttaggtatttttatggagtttagatagataaatagatagatagatggatagatagatatataaagtttttatttattgttttagaagttttgtgtgtatgtgtgtgtgtatatatatatatatgtgtgtgtgtgtgtatatatatgtgtgtgtatatatatgtatatgtatatgtttgtgtgtgtgtgtatatatatatatatatatatatatatatattatatatgggttaaaataaattgttaaattattttgatttttatgattatgtgtatttttagttgttttatggaatgatagggtgaacggaatggttaattgtattaaagtataagtttcggtttaattggacggtaataagttacggaggttttttttttcgaaatattattagatatttgtttggggtatatggagagttgaatggttgttatagtttgggttattagtgatatttaggatgtgggtgtaggttgcgagtttttttataggtttatcgaattttattttttgtttagagtgataataggagtgatttatattttttatagagaatgaggggattgttttaggatttgatttttgtaaagtgggaaagagtaatgatagatttttataagttttatttttttatgtaattttgttttggtatatagttaatacgtaatatatttttttgggattagtattttatttaaggggaaatggaattatttgtgtttgaggttgattagtagtatatgtataatagttatttttatcgagggtttgtgttgaaaattttatttatttaatataggtatttatgtttttatattttgttttaatttttaaagtttgttttaagttagttattttaattatttttatttttttaggtttattgtttggtgggttaaaggaagttaatgggattaggagttttagtaattttgggtgggtttggggtagagttggtgattaatttaaaagttaattgttttacgggatttttttttgagatatttatttttaatttatatttttaagatttttggtttagagtagttgggttgtttatagtaattaatataggattgtattttaaatttttatagttaggtggcgtgtggtttttatataatatttaggtttttttttattttttgtgttaggattaattttaattatattagtttttagtgatggagtttgtttatggtttatttttaggttttttttagaattagtttaaagggttttttaggtgatttatatatttttaatttatttttcgttttttttttttttaattagttttttgattcgagtgtaatgtgtttatttttgattagttgtttgtatagttgttttatttgatagggatttttttagtttgggtggagtttgttttttttttaagttttaattagtattgagttgttaagttggaagtggtgaattgtgaatttaaggggtggggtttgtgttataagtttttttaattttaagttgttttttgggagtttatataatttttatatatttgtttagttagggtatatatttttatatatttataattttttagtattttattatatatgttttggggattttaatgattttttttatgtaatatagatattagattttttttttttttttagatagaatttcgttttgttatttaggttggagtgtagtggtacgatttcggtttattgtaagttttattttttgggtttatgttatttttttgttttagtttttcgagtagttggaattataggtatttattattacgtttcggttatttttttgtatttttagtagagatagggttttattgtgttagttaggatggttttgattttttgattttgtgatttattcgttttcgttttttaaagtgttgggattataggtatgagttatcgtattcggttaatattagattttttattatgggtttgtttattattttttttttattagggagtatttattttttatttttagtttaagtggtttttattttgtttagttttttttttttttttgaaaattggggttttaatattattttagggatatttgggttaaatagtttaaattttttttttagggagatttgtttagtagttttatttataagtttgttttttatagtttttatagtgttttttttttgatggttatttatatgaattatggttgtttttgttggaaataggaggttttttaaaatttgttttttatgtattaattattttgttttgttattttttaggttttgttttgtttagatttttttaaaggtgtgtattattttataggtatatttggaattagtatatatagtgtttttttgattttttaggagttttagggtttggttaaaagtataaaatttataggtttgggttgattagttattgagtaatttaatttttttatataaggattgtttgtttttgtttatgatagtatagttattgtgttttttattatttattatttaggatgatttatttataaataattttattttattatgtagtagagtttttttaaggtttggtattaattttagtttgatattttgtgatatttaaatagttatattttgacgtttttttattttttttttttttttataagaaattggttggtgttagtttagttatttttcgagggtttattgattttaggaggaatttggggaggtaagggattgattagttggtattttagagtgtttttggtcgggttttgttgggtttggttttgggttaagagttgttggtttgaagatttgttagtttatggagttttttttgatgggtatttttattagaaaaggtatttttggtttcgttttttttttttgttttttttttttttttgtgttttaaaggtatcgttttttttcgtggtaggtttagaggtgtattgtttgtgttttaagtaatttttattggtgatttagtaattgtaaagggtttttagtttgtttagttttgggaggggatttagtggttttttttttttttgggttgtaaggatttttttttggtttagttcgattttgggaaatagaatttttatatattttattttaaagtattttggtagatttttttttagtacgagttttttttattttagggattgtaaattggtatttttttttgtttgttttgggtttttaagttatttgaatagaatattagtattttaaaattatattttatataaaaagttagaattttgttttttgataaagtagataatttggtaatatagtgttagtattgtaagaagagttgagtagtcgttatagtttttatttagttttgtagtttttttttttattatttgttggttttgtagttatttgagtttataattttagtattgattttttttatgtagcgattttagtttttttgttgttttattgatagttaattgtttttggtggttttttagttttttattaaaataataaaattttaatgttattttatttatttatttttttataatttgaatttttttgattattttttgataaatagttatttagtttttgttgtaggtaattcgttatattttaagtagtttgattttaaatttttttttatattttttttttatttgtatttattttttagttttcgggttttgtcgttttttagtggttacgtattgtatgtattttttttttgtatttttttgttgtttaagtttttagaaattttttttagttttgttaattttttagtatttttttattttgttttgtatttttttttttttttatattatttgtttttttagttttattttttgtgtttttttttgatttttgttttttttagttttttttgttaattttttttttttattttttttttgttattttattttttttttgttttatatttagtttttttttttttttttgggtatgagtcgagtcgtgttgtgttttggttttttttgtttgtttgtaaaaataggtagttttgcggaaatgatttagtagtaatttttattaatagtttttagaagttagttgttatatatagttgtgtcgttggttttttttttttttaggtatagtagtttaatttttttttttttttttttttttatatatatatataaattttttgagttttttttagtatttttttaattggttttttattttattcgttaattttttgtagttttttagtaatattatattagtttttagttataaaattaatttttaaaaggttttgttttattgggttttttggatttaattttgaatatttttttatttgatttttgagtttttgtagaaatgtagagggagttttttttttttgttgttggattttgaatgttttggggacgttttgtgttttatgagtggattgtataatttttttaattattagttttttatggttttgtatttggattcgatttttggggttattattattttatttaggatttgtatttgggaatttttgtttagttggtaggatttattatttaggaggatgttgttgttttttttaaatgattatggttgtttttttaattattttcgttttttttttagtaaatagaatatttatgattgaattattttagtttaagtataaaaattaggttttaaaaattgatttagttgttttgttaaattgaggggatttttcgagagtggttttattttttttttaaaatttttaattttagtatttgttaaaggtatatttataaatttaatttattattattaatattattatattttaaattttgggatatacgtgtagaatatgtaggtttgttatataggtatatatgtgttatggtggtttgttgtatttattaatttattatttatattaggtattttttttaatgttattttttttttagttttttatttttagataggttttagtgtgtgatgtttttttttttgtgtttatgtgtttttattgtttaatttttatttgagtgagaatatgtagtgtttggttttttgtttttgtgggtttttttttgagagatttagagaatacgtagttgatggttttttgagaatgatggtttttagttttatttatgtttttgtaaaggatatgaatttattttttttatggttgtatagtattttatggtgtatatgtgttatattttttttatttagtttattattgatgggtatttggattggttttaagtttttgttattgtgaatagtgttgtaataaatatatgtgtgtatgtatttttatagtaaaatgtttataattttttgggtatatatttagtagtgggattgtgggattgttgggttaaatggtatttttggttttagatttttgaggaattgttatattattttttacgatggttgaattaatttatatttcgattaatagtgtaaaagcgtttttatttttttatattttttttagtatttgttgttttttgattttttaatgatcgttattttaattggtgtgagatggtattttattgtggttttgatttgtatttttttaatgataagtgattatgggtttttttttatatgtttgttgattatataaatgtttttttttgagaagtgtttttttatattcgtcgtttattttttgatggagttgtttgttttttttatgtaaattaagttttttgtagattttggatattagttttttgttagatggatagattgtaaaaatttttttttattttataggtggtttgtttattttgatgatagttttttttgttgtgtagaagtttttgagtttaattagattttattagttaattttggttttcgttgttattgttttttgtgttttagttatgaagttttcgtttatgtttaggttttgaatggtattgtttaggtttttttttagggtttttatagttttaggttttatgtttaagtttttaatttattttgagttgatttttgtataaggtgtaaggagggggtttagttttagttttttgtatatggttagttagtttttttaatattatttattaaatcgggaattttttttttattgtttgtttttattaggtttgtttttttttatattgttttaattttttttttaagtttggataaggatttaagggagtattgggtttagtttttttatgattttttaaattttttttttttgattttttttttgttttttgatttttttgttttttattttgtgagatgtatagggtgtagggtaagcgtgttaggggattttagggttttttattgggtgagggttttttattatgttttttttatttttttttaagggggaatacggggtttaatttattaatttaataaatagtataatttatttttttttgtgaagatggggttttattatttatatagagaattaaagtttggtatatatagtttttatttgagttaaatttaggttaaaggattgaaggttgataaatgggttttttaggttagataaaatagtaagtaatatattattattttttgtttttttttattttaggttttttagttatttttgagttagttttggtaatttttatttttgtatgaatttgtttattttatttaagtggtttaatttattgattttaggttttttagagtttttatttataatgtttttgaatttttaaagggttattagtgataattttttttttgtttataattttggtaatttattttattttttattatttttgttttgattgttggttaagaaaatagatagaggtagtagatggttatgtgattttttagtgggaaggttttgattatatatggttggtaagttagattgatggtagtaattttaaaggagttgttaagggattttgataggaaagttattgattttggattgggttatgtttaattaggggaagaggttaatgttttaagggttatgaaattattagaaaaaaagagattgtattaatgtggattgttgagttttatttttttacgtaagaaaatatattttatagttttaaatggttaataatgtatagggagatgttttttttagaagaaaattttgatagaaaattgaaatggttagttgaagtattgtttgtttaaaaattggtaatatagttgttgggtaatataaatatgaaggattggtttttatatttttatgaatgtgtttattgtttatatgggtggggttgtaagagtgatttttttagatagtttttttttttttatttgatggattaggacgatgttgttatgattatatatataatttttttgaaggggagaggatgttggaataatgattacgttttattttaaatttttttttttatatgtgatgtagtggtattaggaatagggatgaaaattaaagtgttagaaataggaattatttttaagttaaaaattataattatatatttatatttttatataagaatttttaagtaatttaaagatggtgttatgtttttattttatttggtaaagttaggattaatagtaaatagagttatatagtttggtggttagatggtttttattagttttttatttatataatttattttttatgattaagagtagatcgagggaaggtatgttagaatattattgttgtttgtagtttaggttagtatagtagataaatttgatgttatttttaaaattggaaaagattgatataaagggatagaaggaggaataatggttgagggtaagtgattaaattaaagggttatataatgaggaaaatttaatattagtttaattttttaaaagtgttgtgagtaagagaagatattgttttttaggttaattatattgggtgtttaaaagagtgaagttatatgtttttgagattatttttgtttttggagtttggtaaggttgagtggtgtttgtaaatttgagtgattttattttgggagatatatttatacgagaggatggtgaattgttttaattttgaatgattgaatgagattttgataatacgttaatatttttttatttttataattttttttttataaaagatatgtggttaaagaaaagcgggtaatttgaggtataataaaaatatttagtttttgtttttggttttttttaaaaattttagaattttttgagtgataagagttagaatattgatgagaggatttatggttgagcggattttggatattttgagaatgggggttgattgttagagatatatatttgtgatgagagcgttgttttattttattttgtgttgttataaagaaatgttagagattgattaatttatatgaataaggtttatgtggtttgggattttgatgtttggaaatgtttgagtatttggtgagggttttaggttgtttttatttatggtagaaggtaaaggggagttggtatgtgtagagattatacggtaagagaggaatagagagtttaggaagttgttaggttttttttaataattggtttttttggaaattaaaagagtaataatttatttatttgcgagagaggataggatttttttatttataaaagattggtttttatgatttaaatagtatttattaggttttacgtttaatattgggggttagattttaatatgaggtattagggggtaaatatttatattattatattttgtttttagttagttagagtttatgttttttttttattgtaaaatatgataattttttaattgttttaaatgtgttaggttgttttagtattaatttaaaattttaaagttttatttgagatttaaggtaagtttttatagttgtgagtttgtaaagttttaaaaaggttatttatttttaaaatattaatataagagtggaagagatattttttatatatttttattttaaaaggaataaatgggttaaaagaaatgaatgtagtgtttttataaagttgaaatttattatggaagatgttaaaatttaaagttttaaaataattttttttgattttatattttgaattttgagtatattggtttaagtggtgggtttataatgttatttgtagttttatatttttggttttgttgaatataatttatatagttgtttttatgggtgaaaattgaatatttatggattttttaagttgagtttgtatattgttagtggttttattatttagtagttttgataggggttttgtttttgtagttttattgggaattgttttggatattaaattttttttttaaatattagttttagttttagattatttttttgtttatatatatgtgtatagattattataataggaagttaaattttgaatgttatgttgtttagaaattttttttattagatatttttaattattatttttatgtttaaagttttatagatttttaaggagggggtagaatgtttttaagttttttgttaatgtataataaaagtgattttttttttaggttttagtaagttttttatttttatttgagattttattagtttgggttttattgtttatattattattagtattttggttataataatttaataaatttttaggaagttgtaagtttttttttatttttttgttttttaaattttttaaatttttttaatttttatttgttatttagttttaaagatatttttatatttttagttacgtttattgtagtatttaatttttggtatcgattttttgaattatttatttttaattgttataaagaaatatttgagattgggtaatttataaagatagaaggtttaaattggtttatggttttgtaggttatatgaaagtatgattttggtatttgtttaatttatgagaggattttaggaaatttttaattatgttggaaggttaaggggaagtaggtatgatttataagtttggagtaggagggagagagagtagggaggtattatatatttttaaatattagacgttgtgagaattattataagaatagtattaaagagatggttttaaattatttatgaaggatttatttttatgagttaattatttttttgaggtgttatttttaattttagtgattataagtgaatatgagatttgggtggagatatagatttaaataatattaggggttatggtggatatgagggtgggttggtttttttattttttatatgatattagggatgtagatatatttagatattttggtagaaagagaagatagaggtttttgaagttataaaggggaggtatgaataaattttgtattttagttttttataaggtagttttagaaaaaaaatagttatgaataaatttagattagttatagtaagttgtgatattgaatagtttattatattttgaaaaattttaaattaaagaatttttagagtttagttgtgttttttatgttttaatttttttttttttttaggttttttaagttgttattttataagttttgagagatatattagagttttgggtattgtttttgtttcgggtggaataaaaataaaatttggttagagtttatagatgatgtgattaaaggaggaattttggggtggtgagtttttttatgggtttttgtttatattattataaggattttagggattattttttttatttttattatatttgtatgaagtttgagtatagttgtttttttttttatttgtggaaagaaaataaattgtgaaaggttagggaggaagtagggttatgagattttagaggagtgtttagaattgtgattgtagatttaggttagaattaggaaattttaggtaagaggatgtgttgaaattggattaattgttttagtgaggtttgttttttgcgggtatttttttttgatttgtgattgttgggagttaggtttttatgattttaatgaaggtgataaatttgttttttatttttataagttttttataaaagagtaagtgttgatagatagagatggtgttttatgattaggtaggatataagttaatttttatttggggttgggaatttattaatggaagaagaaaattcggagtttattttttttttatttgggtttttattttttatattatagtagtgattatagttttggtgaaaatagtattaagaataattaggatagtaacgatgtttatgatggggatggtgggttgggaagatagttgtaagaaaggaggggaacgtgaggggttttgattattaggttttaaattttgattttgttgaagggttttagaagggtttttagttttcgtgagaagagatatgattttttatttttttttttatttattttagggtgaggggttttggtagtttatcgtgttgtatatggtatgtgtatttttgtttttttttagaagatattattatagttgtttatttttggaaggttttgtattttgtaggtgtggtttttataatttttgtattttatatttggttttgtttattttattattgggttagtgtgatttttatagggtagaagtttagagtttagtattttagggtggttttatggttagagatggggtggtgggttatgtgagtttttggggttttgaggggaagagttagaaaatttaggtattttgtattttttatgggatattttattttatgggattattttgaaaattgacgggatatttgaagtggggaagggagtaatttagatattagtttagatataggtatttggggtaattttttattttttagaaagttttagtgtttgaggtcggaatagagatttttggttttgatttgagcggaggtcgaggttaaaaaagttggaattagatttataaatatatattgagtgtgaggtagagaataaggtttgagaggaaaatttttggtgtttaaggttgttgtggggataaaggggatcgcggattagtattttagggattgtttttttttttttttttttagagattttattttttaattgttttagagtgtagggtaggtttttagttattttttagtataggatttgaaaattcgggaggattttttttttttataagagggagagggatattttagcgttggttttattttttttttttttttttggaatgtgatttaaggagatttgtaggagattagggaggtatttcgtggttattggtatttgggtattgtagttttttttttttatttttaaggattttgttgagttatttcgtttattttttttgtaggtaggttttgagtagttttgtttgttttttcgttagggtatttgagtcgttttgttcgttgtagtttaagagcgtagtttttggtttcggacgaggtaattggcgtcgtgatagggtatgtttatatttattgaggagattgtagttcgagtttacgtcgtagttgtgtatttattgaagggtgtgagatttatttttagcgattgcggttagtttaggtcgttgagtttcgttttagtttcgacggagtttcgttttagtttcgattaattttcggggatttgggtttgaattgaaaatggaattcggtataggcgtttggggtttttattgggtggaggattttcgttggtttcgtagcggagtagtataattttagtaatagtgggtagcgtagtatagtggttagtataattttggtagtttttgaatggttacgaatttaatttgtaaaagaggtgatttttggttttattatatataaatgtgtttaaacgtattgtagttagatttataaagttaagttttatttttttagattgtgtatttgtgattttggtttgttgtatttttaaattatttttattttatagttttgagtttgtgtgcgcgagtttaggatattttaatataaagtataatgtgttatcgtatattgtaattaggagtttgtatagaatttaattattttaaatttgtaagtgtttaatgtagttaaagtgttttttattagtgtttatgtatcgtttttatttattatttatttagttagttagttatttttagatcgagtattattttgttgttttagttggagtgttgtggtacgtttatgatttattgaagtttcgattttttgggtttatgcgattaatgttttttttttagtttttaagtatttggtattataggtttgtattattatttttggttaatttttttaaaaaaaaatttgtagaaatgaggtttttttatgttgttttcgttagttttgaatttttgagtttaaatgatttttttgttttagttttttaaaatgttggtattataggtatgagttataatgattattttatgtatttgtttatatttaggaattatttatatttaagttatgtgtatattttattgggatatttggtatttttttttaatttgtttattataaggaggtaattagttattagatagttttatagaatgtattaaagattaaggtgtaagtaatattgtgttaggttttgaggataaatggattaaaaatttataaaattttgtgtttaagtttgagaattttattgttttagaattttttttttttgtttttttattttattttttgtttttttagtttttttttttgtttttgttatttattaggtttttttttttttttagtttttattattttgttattattgaattgcggttttagttttgttttttcgtttgttgtttatgattgtttttttaataatggttagaaattttgttaatgtgagttagattgtgttatttttttatttaaaatattttaatggttttattttatttttaagaagtttttaaaatggaaggtataagtataggggttttgggttgttttgattaaagttgtgtttgtagtatttaaaagtatatttggtatatagtaggtattaagttaatttttttgagtgaatgaaatatgattgtgttaaaaattgtattatataaaaattataaaatgaaaaatgtaaagtaagttaggaaatatttggttttatgtaattattatgtatattagtttataaatttattttattggaggaaatgttatatgtttagttgttgaatttgtttatgaattttttattagtatataattaattattataaatttagtggtttaaaagagtatttatttatttttttgtattttttttattagaaatttaggtttagtgttagagattttttgtttagggtttcgtaaagttgtatttttattttaagattgggatttttttttaagtttatatagagttcgttggtagaattcggtttttggtaattgtaggattaaggtttttgttttttttaggttattagagtagatagtggggagggtttttattttttattggttattagtgtttttttattatgattttattatttttaaagtttataatggaggaagttttttatattgaattttttttatattgtgagtttttatttttaggaagaatttagttttttttagagtttatttgattaggatagtttaagtaggataatttttattttaaagttaattgataggggatttggaatatatttgtaaaatttttttatagtagtatttatattagtgttaatcgagtaattggggtaatgtgagtaattaagggtggttattggggtgttattatagaattattttagtatagtttggtttttttttttgtgtttgaatagaatatataaattgaaggtaaaaaaaattgattattgttagtgataataaaatatattttatataattatgaaaatttttgttaaatattaaaagtaaatgatatgtttaatattttataattaatttagagtaaatgaaaaatttaatgatttatttttttttgtgaaggtgtgttagttatttattgatgtataataagttatttaaaatttagtaattaaaattaataaatatttattatgttttatagtttttagtggttaggaatttaggaaagtttttttaaagtttttttggtttagggttatttataaaattgcggtttaattgttatttagggttttattatttgagggtttaaatggggttggggatttataagttataagaatattttacgtggttgttggaagaggttttatttttttattgtttggttttaggaggttttattttttagttatttggagttttttataggtttgtttatgatatagtagttggttttttttaaggtttatgattttagagaaagagaaaattagaattaaagtaggaagttgtagtgagttttttgtttgtttgtttgtttgtttgtttgtttgttttttgagatagagttttattttgttatttaggttggaatgtagtggttggattttggtttattgtaattttcgatttttaggtttaagtgatttttttgttttagttttttgagtaattgggattataggtatgtattattatatttggttaatttttgtatttttagtagagacggggttttattattttggttaggttggtttcgaatttttgattttatgatttgtttttttgattttttaaagtgttgggattataggcgtgagtgatcgtttttagatttagtgagttttatgatttatatttagagttataaattattattttaatattattttattagtttgtaagtgagttattaagtttaggttatatttataggaagggaatgaagttgtatttttgtaaggaggagtattaaagaatttatatgtatgttaagtatgtatagtatgtatgttaagtaacgtatagaatgtaattattttaaatttgtaagtgtttaatgtagttaaagtgttttttattagggttcgtgtattgtttttattatttatttatttagttagttagttagttagttagttatttttagataaagtaatattttgttgttttggttggaatgtagtggtatgtttatgatttattgaagttttaattttttgggtttatgttattaatgttttttttttagttttttaagtagttggtattataattaatattattgttttaggattttgtaaattaaatattttttgtatttgattaattttttttaatattttaaaattattttttgtaaagtaatgaataaaattttgagatagagaatggagatataataatattttagattttttttgtaaatgtttttaatattaatgttttttttgatgagttgtaagaaagttgagaaaatatagtagttagattaaagagttttacgattggtgtcgtataataatgtttttataattataattatttttttttttttttagaagttattaattttttttaagaatgtttaaaatgttaatttttttatttaagtttttataaaaatatttgtttaattagggtgttttgtagttagagaaaatgtgttttatatttttgtttgtatagttagtttagtattacgataaagatttggtttgatgtggtaggcggaaatggttaattttaatttaggaatacgattttttaataattgggtatttagtgtgtatttattgattaatttaatatttttcgttgtgttttttaattagatgtggtagaagtgatttggattttagtatgattttgaaaaatatagttattttgtgtttttaatgttgttgtaaaagaagttttttcgtgttttttattcgtattgttattttattattagttatttttttatgtgtttttatttaatttattttgttcgatagtgttttttttttattttgtaaaagtttaatttatttgtattcgtggtaaaattgagtaatatattaaatttttaaattttttgcgagatataattgttttgtatattagattgaatattgtatattagagaatgtagagagttgttaattagttaagaattaaatgatttatttttattaaaggttatttttttatggtattttggtattttttgttatatggttttttataattggttgtggttttgttttaatttatgtagttattgttaaggatttttgtaatgaatttttgtgttttttttttttttttatttttaaataattaggaatggtatataaggtgtattttgaaaattgttattataaatatttgtgggttaggagtggtggtttatgtttttaattttagtattttgggaggtcgaagtgggtggattatttgagattaggagttggagattagtttggttaatatggtgaagtatagtttgtacgaaaaatataaaaattagtcgggtattatggtaggtgtttgtaattttagttatttagaggttgaggtaggagaatcgtttgaatatgggaggcggaggttgtagtgagacgagattatattattgtattttcgtttgggtaataagagtgagattttattttaaaaataaatgaataaataaataaataaagatttatgattaagtaattaattatttggatatttttttttggtataagaaatagaatttatgaagttattttagattgttgtttaattttatttattaaaaggaatttttattttgagttttgtatttattagttttttgtattgtttttaaagatttttataataaatatatatatttaaattatagtttgatttgtttttttaatttcgttgtatagagaatttatattatatgtatttttttgtgatgtatgttatgtgtaggagagttatttttgatgtgggagggtgttgtttaattatttttattgttaaaattttatttttcgtaattatattagaattttgttaatttttattgatgtatatgtgattgtttttagtttttttgttataaatattggtgtatacgtttttgggatatatagttaaagatatttttagagtgtatgattaggagtagatggtgggattatatagtgtatggatattaattatataagataaggttaatttgattttttaagtgtttgtattaagaatgggaaagaatttatgttgtttatgtgttttgaaaatatttagttgaaggtggagattatatgttaaaaaattattgttttggttatagaattattttaggtatttttttatattttattaatattttttttttttttatttttattttgtaaattatggtattatattttaagtataagatttaaatagtgattttttttagtttaattatatagagtttatgaaaaagtggagggagggagaaagttttgagggaggaaaggaggaaagaaagatggaaggatagagaaagataaaatgaatatttttaaaaaagaataggaggaaaggattagaaatagtaagtgtggttaatattattaaaatgtaggaaattaaaagatgtagataatatttatggaataatagaaatttaagaaagttttaatagttattaattgttgtgttataaattattttaaaatttagtggtttaatataataaatatttgttaatttaaagagatattacgaacgcgcgtaaaatagattttatgggggtggtagaagttggttaaagagatggattttataggttggaataagtaagagttattggtgtgtatatggtaatgttttttagtttaagttttttaaggagtagatgttaagatgagtttaaagtttacggtattttatgaggggatatatttgtaagggaatatgagacgcgagttagaaatttttggaaaaggcggtagataatgatgtaagtgtgattttaagtgttggatagaaggagataaggtttgttcgacgtattttagagtagaggtagtttaaggagagttgaggaagggtatggaggagttttggagttatatttggttattagaggagttttatgttttttagtaatggtttgttttagtgtgtttgttgtgatcggttattggttgggaataatttatggaagtagggtttttgtattaattttgttgaggatgttagagtatagaagtagagacgtgggatattatttaggagtattatttaattttttttttttgagggttttgggtttttgaatattaaatttttttaggttgggttgttggatgatttcgtttatataacggataagggaaattaggacgtttttaagtggatttttggtttttatatatattttttttgtttttattgtgtgatagtagcgttgtttttttttttttttatttgtttgtttttgggtatatattatttaaatatttttgggtgtaattataatgtgtagttttatggatttttatttgtttttttgttagggtgttttttttgggaaattaggattttttattttgtagagtttagattttggaagtaagaagagtaaaattattttgggggtgaatataatgaataaaataaatatatatatatatatatgtataaataaatttatttaagtatttatgttatgtatttatttatttataagtaaattattttgggggtgaatataaggaatgagatatatttgttttgattttttggtttttggattcgcgtatttttttttttgaaaatagtgttttagagacgtttttgatttaatatatgtattatattttgaaagatggtatttattttttagagggttttatttaagttggtattgaattgtgtttgtagagttttgtttatgattttgtgtgtttggtagtatttgagaggcgtaggtggtgatacgattaggggattttatggttagggtttatattttatttttttttttaataggtgtgttttttaggtagatagtgtattgaaattttgagttagtggattaggaatgttaatagtgttgttgattgagggtttgagagtagagaggaaaattatattatatcgtatttttgtgagtttatttttgtgaggataaatttttgttttttttaggatggatggtgtttaagttatttaatttgttatttaggggttagttagttattttaagaaatagtgttttattggtgtttattattggtttgtaatgtttacgagtagagtatttagaggaagtagtagttgggtgggttttggtagtggagagatagtgttgttggatttatttgtagttttatttttgttattgtggttgttttatttacgggttttttttattaggtttgggttgatttatgatgtagattggttaattttaatttgtttttaatttgtttggttatttagggttatattaggattgggtgttttttgtgggtgttaatatggaattgaggtttaatcgatatggatcgttttcgttttatgatagatgtcgttgggtttgtttagtgaatgattttatgggttatatagaagttaatatatacgggtatttggaattatatggttgtttggtgttttatgtttaagtattttattttattagggttagtaatatgttaaaagttgtttttaatatggagtatgtttttttgttgtggattttatggttttatttttgattttaggttttgtattttgatttttttattgatgtttggtttagttttattttgtttttttttttagatcgttatttttagtattaggggtttgagggatggtgattgattgtattatagtttgggtttgttgtagtgttttttttagtttaggttttatttaaagttggtttttttttatattatttagagtgttagttaaagtaataaatttagatgtggaatgtggtgttgttagaatttagagaggtttataaggtagtgtgtatttttttttttggtgaggatgtaagatgtaagtgtgttttttattttgtgtgtgtgtgtggcggcggggagttttgtatgtttttaattattggatttataatattttattgtagtggttatttttgaagttttgtaagttttatttttattttttgtagtgtatatgttttgttagggaatttagcgtatttttttgttgttgtttattttttttaatttatgtgatattgttaatgaaatgaagagatttagtattttgtgggatgtttgattcgtttaggttttttaaggtgatatttatagaaggttgaggagttaaggtagttttgatgtaagttattaataaatgtattataaattttatgtgaatgtgaattattttatatttattttttaaatgaaatgggagggaatgtatttattaaatttatagttgtttgttatgtgtttgaggttttattaatttttttaggtagtgatatttagttagtatggtagttgtaattaggatttttatttggttaagtttggagtaattttatttattttttagttatattaggtttttgtaggtatagattgttgagttatatggagataataggtaattttaatattattttatatcgtttaggtttgtaatggtagtgttatttttataatatttgtagtattttttataagatttattttgaggtataatattgtttttggtttggtttggatgagggatgtttttttttgggttttagtatagtgagattttttattttttagattagggatatagtgtggggtgattttagttgttagtgtattaaggttaattatgtatttagagaatggggagataattaggataggatttatggaattggtgattttattatggggtataatgtatttaggtttattttttggtttttgtaagttttagtgtgatgggggatataatggtgttgtaggaatttgggtagtaatgttagtttatatttaatgttaatatttattttattttttgattaaatggttataggtttttttgtagaagggttgatggaattgttttagtatataattattatcgtgttttaaggtttttttttttagggatatagatatgtttttagttattggattttgaatttgaagtttgttttttaattttatatgtttattatagatattaagtagtgtttttgttgtttgtttattttttttgattttgggatattattttttattaattttttttataattttttgaaggttaagtttttttggttgatattttgggttattatagtaaatgtgttttttattttttgtaggttattgaaaaggagggtttttaaagtatttatttttgattttgagggaggtgggtgtatttattttaggatttaggtttattatagataagtaaaaaagtttttatatttaaaattgttttgggttatatgtagtttacgagtcgcgggttggataagtttgtatttagaacgtatgtattataattttagatatttttttgtttttattttaaggatgttttttaaatgtaaaagtagttatatttttagtagataataaatgttagttgaatgaatgattattgtagagtatttttttattttaaagtttatatttttattaatgtagttatagggtaaatgttgttttgtggtagttaaagaatataagtttacgtggatatttatgtcgttagtgttttttttattagggttgtttgtatgttttttttttttttatattaatttttttgtatattttagtataaaattatatatttttttttaggaataataattttagttttatgggtataattttttaattatatatgaatttaaattagattttgttttataaatttatgagtttggattggagttagtattaggattattataatttagagtaggaagaagagtaggagggtagaagaggagttttaatagaaagttaattatgatgagaaattatgggattttttttttttgtaaatgttataatttggtttttttaaaaagattggagaaaaatcgaaaatattattaaggaaaaagttttgggaggaaggtaagatttggataggtttgaaaatttgttttttgatattataaggagatttgtatgtagggattattttaggtgatatttaattttttgtgattataggttttggtgggataaggttttattgaagggttaaggataatggagtagtaaagatgatttaggtgagttgtgattatataaagtttatggtggttagaatagaaattgggtatagttttatttattttttttttttgtaataaattagtataagaaatacgtggattttggaaggtttttatgttttttatttattttgttttttaaattttaggaatttttttttttaattaatttattaattttttatggtaagaatttgagaaagtaaatttatattaaggttttaattttaatagggaaggaagaagttatagtttagtgtattatgaagttgagatagagatggagatattttagttttatttttttggaataggaaagatgattggggagggagtataggttagcgtgggaagagggttatggtggatatgggggtggggtggtttttttatttttttatattatgtttatacgaatatagatatatgtaggtgtttttgtagaaataaagttagggttttttaagttataaagggaagggtaggaataatttttgttttttagttttatataaggtagttgttttatattatagaaaaaaatatttatgaataaatttatatttattatagtgaggggttatattttaaatagtttatcgtatgtttaatatatttaatgtaaagaaattttatagtatagttgtgtttattgtttcgtttaatatttaatatatattaggttttttaagtttttatttttataagttgtgagggatatattagagttttgggtattgttattgtttggggtagaataaaaatagaatttggttagattttatagaagatgtggttagaggaggaattgtgaggtgggtgggtttttttatgggtttttaaatataatattttaaggattttaggtattagttttttttatatttatttgtagtttgagtgtaattttttttttttttatttgtgagaagaaaatgttttgtgagatattagaaaggagttagggttttaaggttttagaggaattttttagttttggattttagagaagtttttagaaatgtgtgattgtagatttagggcgggattaggaaatatgaagaaagtaggtgtgggttttggattaatagtttttttgaggtttgtttttagggatttttttttgtgatttgtgattgttgggattaggttttattatcgtcgtaattaaggtgataaatttgttttttattttaataggtgttttataaaagagtaagtgttggtatatagggtttagattgggtaggtttatgattgtggacggtgttttttagtaatgagatagggtatatttttagttggggtttggaatttttagtgagataagaaattttagattttattttttattttttttttatttgagtttttttttttttatattacggtagcgattatagttttagtgattatagttttaaggagaattaggttagtaatgatgtttacgatggggatggtgggttgggaagatagttttgggaaaagaggggaaggtgaggggttttgattttgttaaaggtttttagagaggtttttgttttttttaagagatatgatatttttatttttttttttattttattttagggtgaggggtttgggtagatttttatgttgtatatggtaggtgtatttttgtttttttttagaaggtattattatagtcgtttatttttggaaggttttattttttgtaggtttggtttttacgagtttcgtgttttgggtttggttttttttatttcgttgttaggttagtgtgattttcgtagggtagaagtttagggtttagtattttagggtggttttatggttagagatggggtggtgggttatatgtgttttgggggggtttgacgggaagagttagaaaatttaggtattttgtatttgttatgggatattttattagtacgtatgtggttattttgagaatggataggatattcgggatggggaagagagtatagaatttagatattagtttggatataggtatttgggataattttttattttttgagaagggaatagcgatttttggttttgatttgagtggaggttgagggatttagaagtgttggatttagatttttatatatattgagtgtgaagtagagaataaggtttgagaggaaaagttacgggtttaaggttgttgtcggtgttaaagggaattatttattagtattcgagggatcgttttttcgttatttttttagagattttattttttaattgtgttagagagtagggcggaattttagagttattttttggtataggatttggaatttaggaggattttttttttttaggattagagggagggtgatattttagtgttggttttaattgttttttttttttgtgggaggttagttcgggagatttataggcgattagggaggcgtttcgtggtttttggtattcgtgcgttgtagcgtttttttttcgttttttaggtatttgcggagttattttacgtacgtgttatttaggtaggtttttaattgtttcgttttatgggtcgttttttatttgcgtttggtgatttgagtcgttatgttcgtcgcggtttaagagcgtaggttttcgtttagggcgatgtaatttttgtcgtcgtaggcgttttgtcggtattcgcggaggaagcgttcgttcgattttacgtcgtagttatatattatttggatggtgtgagaatttggtttcgatttcgcggttagtttagtttttcgagtttcgtttagtttcgattaattcggggggatttttggtttaaattgaaaatgaaatcgggtaaaggcgtttgggtttttttcggggtaagggtttcggggtttcgcggtttcggggtggatttcggattcggagattgtgggcgatttggttcgttcgtgggggatgaggggttttgatttgcgttttcggtcggggttatttatcggtttcgttttggttgtagtagtcgcgtagggtttttaggtttattcggttagtttgtgattgggtttttatatttcgtgttttttggttttaatatttcggttttttttgttttatttacggcgttcgcggttttattttttggttcgcggcgtcgttgtcgaatcgtacgaattgcgtgtcgtttacgtagtttacggcgatgaagcggggtttttcgcggtcgggtcgggatacggatgtgaagaaatattttatggagtgggagtttgggggcgagtagtggttgagatttgttcgattttcgtttcggcgcggttttttcggttttgcgttttcgttaggagggttttttgttttttttcgtagaggcggtttttttttcgatttcgtatttattcgtttaggtttgggttagggttagggttttcgagagtagtaggaggagggttcggggcgttatgacggttattttcggcgtttggggagaatttgagtttcggtgggtgcgtgcgggttttagaatagcgatcgcgacgatattgattggtttttttggaaattcgatatttaatgggagtgagaattgggttcgcgtcgtgagtatttaggatgaaggattttacgtaggttgggagagggagaaaagaaattgcggagttggggaatttttaaggttgggattttttaatttatatatcgttttcggggtttgagattttgagagttacgtttggggttttgggatttcgttttgatttttttgtttttgtgcgaagcgttttgttttaatgtttttttgagttttggtttaggagttgtttgagaaataagggagaaattttcggtatgggtttcgtttttttttttttattttttattttattatttttgtttttgaattggattttttgatttttattttttatttgtttatttggatttttttagaagaaaaattattttatggagtttggtgttagagagtaagtttgatttgggaatggaggtgtagatttttgttgttgttgtttttgtttttaattcggaaaagttgtgtttgagtgtatgagatagaatagagattaatttgttttttgtttattaattatagtgggtagtagaattttggtaatttttgaatgattaggaatttaataggtaaaaaatgtgattttggttttttaatgtataaatgtgtttaaaagtattataataggatttataaagttattaagttgtatttttttagataatgtatttgtgatttttgtttgttttattttaaatttgttattattttttagttttgagtttttgtgtgagtttacgatatttttttaatataaagtagttattgtgtttttatatgttgtaattagaagttattataggttttatttattttaaagttgtaattgtttaaggtagttataatgttttttattagtgtttatgtattgtttgtttttaggaagtatttatttttaagtgttgtgtatattttataggaatatttagtaatttttaaatttgattaatataaaaaatagtttttaggtagatttatatgaggtattaaaagataattgttaaggatatttttttaggttttgtagattgatgtattaaaatttataaaataatgtttttaaatttaagaattttgttgtttttaaatttttttttttgttttttttttttattttttgtttttttagtttttttttttattttttttattttttaggtttttttttttttttagtttttattatattgttatttatgaattgtgatattagtattgttttatgatttgttacgtaattgttttttttatagtggttttgtttttgtgagtcggagtgtgttatttttttatttaaaatattttagtgtttttatttcggttttgtgaagtttttggagtgttaggtatttgagtatatgaggggatatttcgtttattgtagggattaagttaatttttgttgatttaatgaatgaaatatgagtgtattaaattgtattatagataattataaattgtaaaatattgaaaaagtttagaaagattttattttatgtaattagtgtgtatattaatttattaatttattcgtatattattatgtttggtaaaataatatatatttatttgtttatagttttttggttagaaatttgggtaagatgtggatagaatttttattttgggtttttaaaagttgtgtttttattttgaattttttttcgggtttatatagaggtggtagaatgtagttttttgtagttgtaagattgaggtttttgtttttggttagttgttaatgtagagaattgggaggggtttaattttcggtgtttattagcgtttttttttatatagttttttaatttttttttttttttttttttttgagacggagtttggttttgtagtttaggttggggtatagtggtttaatgatttttgtttattataagtttcgttttttgggtttatattatttttttgttttagttttaagtagttgggattataggcgtttattattatgttttaatttttttttttttagtagagatagggttttattttgttagttaggattgtttcgattttttgattttatgattcgttcgtttcggttttttaaagtgtcgggattataggcgtgagttatcgcgttcggtttatagtttttttttttttaaagtttatggtggaggaaattttttatgttgagttttttttatattgtaagtttttatgtttatgaagaatttagtttttttaaggatttatttgattaggatagtttaagtaggataaatttagtataaagttaattaattgagatttttaattatatttgttaaatttttttatagtagtatttatattagagttggttgaataattggaggaaggtgaatgattaggagttgtttgttgaggttattatagaattagtttagtaagggttggattttttttttgtgtttaattgggatatagttggaaagtgaagtttaagtaacgtgattattgtgaatggttataaaatatattttttttagttatggaaattgtttttattttttaaaattaagttatatgtttaatattttataattaatttaggttaggtgtggtggtttatatttgttattttagtattgtggaaggtagaggaatggagatttgttgattttagaagtttaagattagtttgggtaaaatttttatttatataaaaaattagaaaattagttaggtatggtagtttatgatggtagtcgtagttatttaggaggttgaggttagagagttttttgattttaggcgttcgatattgtagtgtatggtgattatgttattgtattttagtttgggtgatagagtaagattttgttttaaaaataataatgatgatgatgatatatttagagtaaatgtaatttgatgtgtaataatatatttttttttgtgaaaatatattatttattgttgtataataaattacgtaaaatttagttcgaaataataaatgttttttattttttatagtttttaatcgttaggaatttaggagaggtttttttgagtgttttttgtttagggttttttataaggttgtattttagttgttagttaggggtcgtagtatttgagggtttcgttggggttgggaatttataagaaatatggattagttatatggttgttggaaaaggtttggttttttgttgtttgtttttagaaggttttagtttttagttatgtggatttttttgtagggttgtttatggtatagcggttggttttttttagagtttatgattttagatttagagagagagaaggtggaagtcgtagttagttttatgttttatatttagagttataaattgttatgttggtattattttataagttagaagttgtattagtttatttttatattgttataaagaaatatttgagattgggtaatttataaaggaaagaggtttaattgatttatagttttgtatgattgaggaggttgttttaggaaatttatagttatggtagaagtggaagtaaattcgtttttttttatgtggtgataggagagagaaatgtataatgaagtagggaaaagttttttataaaattattagattttatgagaatttttttagtattaggagaatagtatgggggtatcgtttttatgatttaattaatttttatgaggttttttttttaataggtagggattataatttgtataataatttaagatgagatttgggtgggaatatagaattaggttattttagaagtgttttattaagtttaagttatatttaagagagggaattaagttgtatttttagaaaggaatagtattaaaggatttgaatatatgttaaaagtaaaattataattattgttttaggtttttgaaaattaaagtttttttgtatttaattattttttattaattttttaagtttgttttttaatttaatttttttttaagttttagggtatatgtgtaggatgtgtaggtttgttatataggtaaatgtgtgttatgttggtttgttgtatttgttaatttattatttaggtattaattttggtatgtattagttatttttgttaatgatttttttattattatttttttttaataggttttagtgtgtgttgtttttttttttgtgtttatgtgtttttattgtttagtttttagttatatatgagaatatgtggtgtttggttttttgtttttgtgtgagtttgttgaggataatggtttttagttttatttatatttttgtaaaggatttgattttttttttttttatggttgtataatattttatggtgtatatgtattatattttttttatttagattattattgatgggtatttgggttgattttatgtttttgttattgtgaatagtgttgttatgaatgtaaatatgtatatgtttttataatagaatgatttatatttttttgggtatatattttgtaatgggattgttgggttaaatggtatttttggttttaaatttttgaggaatcgttatattgttattgttttttataatggattaattatttatttttttattaatagtgtaaaagtatttttattttttcgtaattttgttagtatttgttgttttttgattatttaataattgttattttgattggtataaaatggtattttatttgtcgttttgatttgtatttttttaatgattagtgatgggagtttttttttttatatttttgttggttatatgtatgttttttttagaagtgtttgtttatgttttttgtttattttttaatgaagtttttttttatgtaaatttgtttaagttttttgtggattttgaatattagatttttgttagatgaatagatggtaaaattttttttttattttgtagtatgtttgtttattttgattgatgatagttttttttgttgtgtagaaaaaaattgtttaatttgattgttttttatttataaaaatgagaattttatattttagttaatatatttagtttagtatgatgttaataattttggtttgatgttgtagttcgaaatggttagtttgaattgagagataagttatttttaaaaattggttatttaatgggtattttataatatatttaatattttttgttgtggtattgaatgagatgtgatagaagtgatttggatattattatgattttaaatagtattgttattatgtgtttttgaattttttttttttttagtagttttattttgtttttatttatatttgttattttattattgggtatttttttttattttttttatgttttatttattttgattagtgatgtgtatttttaattttgtaaaagtttaatttagttgtatgtgtggtaaaatgtaacgtagaatttttgtaagatgaaattattttgtatagtatattgaatattgtattattgaaaatttagagagatgttagtgagttaaggatcgaatgatttatatgtagttaaggtcgtttttatggtattttggttttttttgttatatagttttttataattttttgtggtttttttttaatgtaagtagtttttgttaagaatttttgtaatgaattttgaaattttttttttttttatttttataaaaaataggtatattttaatttggaaaattttgtttaaggaattataattaagtaattattagggggtttagtattggtgtaaaatataaaattgtaaaattattttgggttgttatttagttattttttagaaggagattgttgggagtaagttttttaaaatttggttataaattggtttcgagattggttataaataaaatttttgtagtattataatatgtttataatggttttagtatttaagttggaaggttgtgggtttacgggaatgagggtaagggatatttggttcgtttagggtggaaaattatttaaaggtatttttaagttataaataatagtatgagtgatttgtgttttaagggtatgtttttgttgtagttaattagtttaatttatttttttaattcggtttattttttcgttttttataagggatattttaattaatttaatatttatagaaataatgttaatgattgtaataaatatgtgggtaaatttttgtttggggtttagttttgaaggttgtgagatttttgattttttattttatatttttatatttttgtgtgtgtgtttttaatttttttagtatcgttgggttaggatttttttgatcgagttggttttagtagaagattttatgttgagttttgtgatatttatttttttgtatttttttaaagatttgtgtaataagtatatatatatatatatatgtgtatatatgtgtatatatatatatatatgtgtatatatgtgtatatatatatatatatgtatttatatatgtatatatgtgtatatatatatatatatgtatttatatatgtatatatgtgtatatatatatatatatgtatatatgtgtatatgtatgtgtatatatatatatatatatatatatatgtatgtgtgtatatatatatatttttaaaataaatattagtttgttttgttggtttttaagttttttgtatagtaagtttttattgtttttatttttttatgatgtatattatgtgtaggagttatttgtggtgtgggagattgttatttatttatttttattgttgaaggtttatatatggttatattataattttattagttttttattgatgtatatgtggttgattttagtttttgttataaatattagtgtgtatgttttttgtgtatataggtaagaaagttttttagagtggatgattaggaatgggttggttggatgatacgttgtatggattttaattatattagataatgataatataaattttaaagtgattgtggttatttaaatttttataataaatgtgtaatatttgatgttgatgatgtgttttgaaaatattgtgttgaaggaattgagttaaaagttattgttttggttgtagaattatagtaggtatttttatttagattttgttaataattttttgttgtttatttgttttttatatatatgatattatatttttgatatatagatttagaaaatgtttatttataatttaattatatagagttattttatatattaggaaaattttataataaaaaggaaaaaatggaggaagagagagaaagaaggaggaatggaggaaaaagtaaaagaagaaaagaaggaaggggaggggaaggaaagggagaaagaaggagggaaggcgatagtttgaatggaaatagagaagaaagagatggagggagggttagaaggaaggagaaagggaaggaagaggttaggtatagtggtttatgtttgtaattttagtttttgggaggttgaggtaggtagattacgaggttaggagatagagattattttggttaatatggtgaaattttgtttttattaaaaatataaaaaattagtcgggtatggtggtaggtgtttgtagttttagttatttggaaagttgaggtaggagaatggtatgaatttgggaggtagagtttgtagtgagtcgagatcgagttattgtattttagtttgggcgatagaacgagattttgttttaaaaaaaaaaaaaaaaaaaaagaaaagaaaagaaaaaagaaaaaaaaaggatggaataaaggagaaaagaaattaaaataaagaaaagaataggtgttgagaaattagaaatttatgtgtggttaatattattaaaataggagaaaataaaatagatgtagttaatttttagagaataatggaaatgtaagagggttttattagttatttattgttgtgtaataaattatttttaaatttagtgatttgggattattaaatgagggatcgtgttttcgttatttttttagagattttattttttaattgcgttttttcgttattgttttagagattttattttttaattgtgttagagagtagtgtggaattttagagttattttttggtataggatttggaaattgaggaggattttttttttttaggattagagggagggtgatattttagtgttggttttatttgttttttatttttgtgggaggttagttcgggagattataggcgattagggaggcgttcgtggtttttggtataggtgtgttgtagtgttttttttttgttttttaggtatttgcggagttattttacgtatttgttttttaggtaggttgtttgttgtttcgttttatgggtcgttttttatttgcgttgggtaatttgagtcgttatggtcgtcgtagtttaagagtttaggttttggtttagggcgatgtaatttttttatagagaattttttttatagagaatggggagataattaggataggatttatggatttagtgattttatcgtggggtataatttgtttaggtttattttttggtttttgtaagttttattgtgatagggatataatggtgttgtgggaatttgggtagtaatgttagtttatatttaatgttaatatttattttattttttgattaaatggttataggtttttttgtagaagggttgatggaattgttttagtatgtaatagttatggtgttttaaggtttttttttttagggatatggatatttttttagttattggattttgaatgtgaagtttgttttttaatttttttttttttttttattgattatttttgggtgttttttatagagggggatttggtagggttatgggataatagtggagggaaggttagtagataaataagtgaataaaggtttttggtttttttaggtagaggattttgcggtttttcgtagtgtttgtgtttttgggtatttgagattagggagtggtgatgatttttaacgagtatgttgtttttaagtatttgtttaataaagtatattttgtatcgtttttaatttatttaattttgagtggatatagtatatgttttagagagtatagggttgggggtaaggttatagattaataggattttaaggtagaagaattttttttagtatagaataaaatgaaaagttttttatgtttatttttttttatatagatagggtaattattcgattttttaattttttttttattttttttttttttttattttattaaatcgttattgttattatggttcgtttttaatgagttgttgggtatattttttagacggggtggtggtcgggtagaggggttttttattttttagtaggggtagtcgggtagaggtgttttttatttttcggacggggtggttggttgggcggggggttgatttttttatttttttttcggatggagcggttggttaggcggggggttgattttttttatttttttttcggacggggcggttggtcgggtagaggggttttttattttttagtaggggcggtcgggtagaggcgttttttatttttcggacggggaggttggtcgggcggggggttgattttttaatttttttttcggatggggcggttggtcgggtagaggggttttttattttttagtaggggcggtcgggtagaggcgttttttatttttcggacggggaggttggttgggcggggggttgattttttaattttttttcggagtgggtggttgtcgggcggagacgttttttattttttagacggggtggttgtcgggcggaggggttttttattttttagatagggcggtcgggtagagacgttttttattttttagacggggttacggtcgggtagaggcgttttttatattttagatggggcggcggggtagaggtattttttatattttagatgatgggcggtcgggtagaaacgttttttattttttagatgggatggcggttaggtagagatgttttttattttttagattgggtagttaggtagaggggttttttatattttagatagggtggcggtcgggtagaggttgtaattttggtattttgggaggttaaggtaggcggttgggaggtggaggttgtagtgagtcgagattacgttattgtattttagtttgggtattattgagtattgagtgaacgagatttcgtttgtaattttggtatttcgggaggtcgaggttggcggatcgttcgcggttaggagttggagattagttcggttaatatagcgaaattttttttttattaaaaaaatatgaaaattagttaggcgtggcggcgcgcgtttgtaatcgtaggtattcggtaggttgaggtaggagaatcgggtagggaggttgtagtgagtcgagatggtagtagtatagtttagtttcggttcggtattagagggagatcgtggaaagagagggagagggagatcgtggtagagggagagggagaggtagagggagagggagagggagagggagagggagagggagagggttttttaatttttatatgtttattatagatattaagtagtgtttttgttgtttgtttattttttttgattttgggatattattttttattaagtttttttataattttttgaaggttaagtttttttgattgatattttgggttattatagtaagtgtgttttttattttttttaggttattgaaaaggagggtttttaaagtatttatttttgattttgagggaggtgggtgtatttatttcgggatttaggtgtattatagataagtaaaaaagtttttatatttaaaattgttttgggttatatgtagtttacgagttgcgggttggataagtttgtatttagaatatatatattataaggttcgaaatttttttgtttttattttaatgatgttttttaaatgtaaaaatagttatatatttagtagaaataaatgttagttgaaggaatgattatagagaattattttattttagaggtaatatttttattaatgtagttttaggataaatgttttatttttgtggtagttatagaataatattattttatattgatattagtgttattagatttttttttattagggttgtttgtgtgttttttttttttttttttttttttttatattaattttattgtatattgtagtatataattatatttttttttttaggaaagataattttaggtttatgggtttaattttttaattatatatgaatttaaattagattttgttttataaattgatgagtttttattggagttagtattaggattattataatttagggtaggaagaagagtaggagtgtagaagaggagttttaatagaaagttatttatgatgagaaattatgggattttgttttttggtaaattttagaatttggtttttttaaaaagattgtagaaaagatggaaaatataatgaggaaagagttttgggaagacggtaagagtttgaacgatttgaaaatttgttttttgatattataaggattttggtatgtagggattgtcgtaggtgatatttaagtttttgtgattataggttatggtgggataaggttttattgaagggttaagtgtgggtggaggattatttaggtgtcgaggtaagagattgaaagtataaattgttttagtataataaagaaaatagttagaataagaatagttataatataaattagatatagagatgattatgaataattattaattattattataaatattattaattattagtttttaatattattttttgttgtattattaagataatttaggaataatcggcgggtatagggttaggtgttgaagggatattgtgagaagtgatttagaaggtaagatatgagttttttgttacgttcgtataagggttatttgagggttttttggttaagtggtaatattagtgtttaggaaggtatttgttatttagtagattatgaaagggagttttttttttttggaggagtcggggaatattttgttttattagttttttgtagaaggttggatattatttagagttatttgtagttatttagaggtttaaatttttttttgtggtgttgtgttttagtggttatgttttttgtttatttttatgttttttttgtatttttggtttttttttgaattttgtagtagataacggtagaagaaatagtgaaagttttaaagtttttgattttaagtgtagaaaagaaaatggtgatatatgttatttaaaagggaagggttttttattttgtaattacgtgatttgttttattttgttaattatttagaagatttattttttttattttgttttttgttttgtatgtaataaatattagcgagtttagttgttcggggttattatcggttttcgtattttgatggtagtggtttttcgggtttagttgttttttttttatttttttgttttgtgtttttatttattataattttttattttcgtatacggggagaaaattcgttaagtttcgtagggacggattatatagttaaggataatagagtagtaaagatgatttagttgagtagtgattatataaagcgtacggtggtttgagtatttattgggtatagttttatttattttttttttatgtaataaattagtataagaaatatgtggattttggaaggtttttatgttttttatttattttgttttttaaattttaggaatttttttttttaattaatttattaattttttatggtaagaatttgaaaaagtaaatttatatttagattttaattttaatagggaagtaagaagttatagtttagtgtatataaagttgagatagagatggagatattttagttttatttttatggagtaggaatgattaattattggagacggaatataggttagtatgagggaagagggttatggtggatatgggggtgggttggtttttttatttttttatattatgtttataggaatataggtatatttaggtgtttttgtagaaagagagttagggtttttgaagttataaagggaaggcgtgaataaattttgttttttagttttatataaggtagttgttttatattataaaataaaatatttatgaataaatttatattcgttatagtgaggggtgatattttaaatagtttattatatgtttaatatatttaatttaaagaaattttatagtatagttgcgtttattattgtttttaatatttttttatattaggttttttagtgttttatttttataagtcgtgagagatatattagaattttgcgtatggtcgttgtttggggtagaataaaaataggatttggttagagtttagaggagatgcggttagaggaggaatttggggttgggtgagtttttttatgggttttcgattataatattttaaggattagggattagtttattttatatttatttgtagttttagagtagtttattttatttgtgggaagaaaatgttttatgagaggttagaaaggagttagggttatacggttttaaataaattttttagtttttgattttagagaagttttttgaaagtgtaattgttgatttaggataggattaggaaatatgaggaaagtaggtgtgggttttggattaattgtttttttgaggtttgtttttagtagggatttttttttgtgatttgtgattgttgggattaggtttttattattataattattaaggtgataaatttgttttttattgttataggtgttttataaaagagtaagtgttggtatatagggtttaggttgggtaggtttatgagtgtggatggtgttttttagtaattaggtaggatatatttttaattggggtttgaaatttttagtgggataagaaattttagattttattttttatttattttttatttgagtttttttttttgtatattatagtagaaattatagttttagtgattatagttttaaggagaattaggttagtaacgatatttacgatggggatggtgggttgagaagattgttttgggaaaaaaggggaaggtgagcgtttttgatttttagtttttagtatcgattttgttgaagttttttagagaggtttttgtttttttaagagatatgattttttttttatttattttttgttttattttattttagggtgaggggtttgggtaattttttatgttgtatatggtacgggtatttttgtttttttttagaaggtattattatagttgtttatttttggaaggttttattttttgtaggtttggtttttagaagttttatgtttcgagtttggttttttttattttgttgttaggttagtgtgatttttatagggtagaagtttagggtttagtattttagggtggttttatagttagagacggaatggtggattatatgtgtttgggggagaggtttaataggaagtgttagaaaatttaggtattttgtattttttatgagatattttagtagtacgtatgtggttattttgagaatggataggatatttggggtggggaagggagtatagaatttagatattaatttggatataggtatttgggataattttcgaatttcgtggaaaattttagtttttgaggagggaatagtgatttttggttttgatttgagtggaggttgagggatttagaagagttggatttagatttttatatatattgagtgtaaagtagagaataaggtttgaggggaaaagtaacggggtttaaggttgttgttggtgttaaagggaattttttattagtattttagggattgttttttttttatttttttagagattttattttttaattgtattagagagtagggtagatttttagagttatttttttgtataggatttggaaatttaggaggattttttttttttaggattagagagaggacgatattttagtgttggttttattttttttttttttttgtgggaagttagtttaggagatttataggcgattagggaggcgttttgtgttttttggtattcgtgagttgtagcgtttttttttcgttttttaggtgtttgcgagtttttttacgtacgtgttttttaggtaggttttgatttgttttgtaaatttttttgttttttatttgcgtttggtgatttgagtcgttatgttcgtcgcggtttaggagcgtaggttttagtttcgggttatgtaatttttgttatcgttggcgtgttgtttatattcgcggaggaggcgtttttttagttttaagtcgtagttatatattatttggagggtgttagattttggtttcgttttcgcggttagtttcgtttatcgagtttcgttttcgtttcgattaattcgcggggattttggtttaaacggaaaatgaaatttggtaaaggcgtttgggtttttttcgggtcgaggatttggcgggtttcgtagtttcggggtggattttggagtcggagattcgcgggggggattcgggacgttcgtgggggatgaggaggggtcgtgattttcgttttaggtcggggttatttatcggtttagttttggtggtagtagcggcgcggtatgggtaggtttatttttgttagtttgtgcgcgggtttgatgtttcgtgtgtttcggttttaatatttcggttttttttgttttaattacggcgattgcggttatattttcggagtcgtcgcgtcgttgtcgaatcgtacgaattgcgtgtcgtttacgtagtttattgcgatgtatcggggtttttcgcgattcggtcgggatacggcggtgttgaaatattttatggagtgggtatttgggggcgaggaggggttgagattcgttcgatttttttttttgcgttgtttttcgggttttgcgttttagtgcgcgggtttttatttttttttcgtagaggttattttttttcggatttcgtatttattcgtttaggtttcggttagggttagggtttttaagagtagtaggaggagggttcgggacgttatgattttattttcggcgtttggggagaatttgagttttaatgggttcgcggggatttttggaatagggattttagcgacgtcgattggtttcgttagaaattcgatattaaatgggggtgagaattgagtttatattttgagtgtttaggaagaaggattttatataagttgggagagggagaagagaaattgcggagatggggaatttttaattttgggtttttttaattaatatatcgttttcggggtttgaaattttgagagttacgtttggggttataggatttcgttttgatttcgttttttttgtgttaagcgttttgttttaatgtttttttgagttttggtttaagagttgtttgagaaattagggagaaattttcgttatgggtttcgtttttttttattttttatttcggaattttcgttttagaattggattttttgttttttattttttatttatttttttgaatttttttagaaaaaaatttattttagggagtttggtgatagagagggagttcgtcgttagagagggagttcgtcgttagagagggagttcgatgttagagagggagttcgttttgggaatggaggcgtagagataggtttttgttttttttttttttaaattcggaaaagttgtgtttgagtatatgagatagtatagagataagttttttttttgtttattaattatagtgggtagtagaattttggtaatttttaaatgattaggtatttaatcggtaaaaaaatgtaattttggttttttgatatataaatgtgtttgaaagtattataataggatttataaagttattaagtttgattttcgtagataatgtatttgtgattttcgtttgttttttatatttatttttattttatagttttgagttattgggtgagtttaagatatttttttaatataaagtagtatattgcgttattatatgttgtaatcgggagttagtatagattttatttattttatagttgtaagtgtttaatgtagttataatgttttttagtagtgtttatgtgttgtttgtttttaggaagtatttacgtttaagtggtgtgtatattttataggaatatttagtatttttaaaatttgattaattaaaaaaaattagtttttaggtagttttaaatatagtattaaaggttaattgtaaagaaggaatattaagtgttttttaaattttattaatataaaaaatattagtttttaggtagttttatattaggtattaaaggttaattgtaaagaatattgagcgaggttttgtagatggatgtaataaaaatttataaaataatgtgtttaaatttaagaattttattgttttttaattttttttttttgtttttttttttaattttttgtttttttagtttttttttttgttttttttattttttaggtttttttttttttttagtttttattattttgttatttttaaattgtggttttagtattgttttattatttgttacgtgattgttttttttatagtggttttgtttttgtgagttagagtgtgttatttttttatttaaaatattttagtggttttatttcggttttgtgaagtttttagaatgttaggtacgtgagtatatgagggtatatttggtttattttaggtattaaatttttgttgattgaatgaatgaaatatgaatgtattaaattgtattatagaaagttataaaatgtaaaatattgaaaaattaagaaatattttattttatgtaattagtgtgtatattaatttatttcgagtttgttgagtttgtgtatgaattttataagattgtataataaattattataaatattgattttaaataatatttaattattgttgatttatttgtttttagagatagagtttttttttgttatttagggtgaagtgtagttatatgattatggtttattgtagttttaaatttttgggtttaagggatttttttgttttagtttttagaatagataggattgtagataagtgttattacgtttagttaattaaaaagaaattgtagagatgagtgttttattgtttgattttggttggttttaaatttttggatgtaagtgatttttttgtgttagttttttagatgttaggattgtaggtgtgtattattacgtttggttaaataatatttatttatttgtttatagtattttagttagaaatttgggtatgatgtggatggaatttttgtttcgggttttttaaagttgtgtttttattttgaatttttttttaggtttatatagaggtggtagaatgtagttttttgtagttttaagattgaggtttttgttttttgttggttgttaatgtagagaatagggagggttgcgtttaatttttgatgtttattagtgtttttttttgtatagtttttttatttttaaagtttatagtggaggaaattttttatgttgaattttttttatattgtgaatttttatgtttaggaagaatttaatttttttaaggatttatttgattaggatagtttaagtagtataaatttagtttaaagttaattaattgaggtttttaattatatttgttaaatttatttatagtagtatttatattagagttggttgaataatggggggaaggtgaatgattaggagtttgttgttgaggttattatagaattagtttagtaagggttggattttttttttgtgtttatttgggatatagttgtaaattgaagtttaagtaaagtaattattgtgaacggtaataaaatatattttttttagttatgaaaattttttttattttttaaaattaagttatatatttatattttttaattaatttaggttagatttggtggtttatatttgtaattttagtattgtggaaggtagaggaaggtagatttgttgattttagaagtttaagattagtttgggtaatatggggaaatttttatttttataaaaaattagaaaattagttaggtatagtggtttatgattgtatttttagttatttaagaggttgaggttagagggttttttgagtttaggaggtttatattgtagtgtatggtgattatgttattgtattttagtttgggtgatagagtgagattttgttttaaaaataataataatgatgatgataaatttagagtaaatgtaaattaatatgtaataatatatttttttttgtgaaaatgtattagttatttattattgtataataaattatgtaaaatgtattattttaaaataataaatattgattattttttatagtttttagttgttaggaatttaggagaagtttttttgagtgttttttgttaagggttttttataaggttgtagtttagttgttagtttaggtttgtattatttgagggttttattggggttgaggatttatatgaaatatggattagttatatggttgttggaaaaggtttagtttattgtaattgggttttagaaggttttagtttttagttagatggattttgttgtagggttgtttatggtatagtagttgattttttttagagtttatgattttagagatagagagagagaaggtggaagttgtagggagttttaggttttatatttagagttataagttgttatgtcggtattgttttattagaagttgtattagtttgtttttatattgttataaagaaatatttgagattgggtaatttataaaggaaagaggtttaattgatttttagttttgtatggttgaggaggttattttaggaaatttataattatggtagaagtggaagaaaattcgtttttttttatatggtggtaggagagagaaatgtagagcgaagcggggaaaagttttttataaaattattagattttatgagaatttatttattattattagaatagtatgatttaattattttttatgaggttttttttttaatattggggattataattcgtatgataattgaagatgtgatttgggtgggaatatagaattaggttatattagaagtgtattattaagtttaagttatatttaagagagggaatttagttgtatttttggaagggagtagtattaaaggatttgtatatatgttaaaagtaaaatttaaattattattttaggatttttaagttaaaggtttttaatttaattatttttttttaatattttaattttgttttttaatttaatttagtttaatgttaagttttagggtatatatgtaggatgtgtaggtttgttatataggtaaacgggttttacggtagtttgttgtattaattaatttataatttaggtattaatttttgtatgtattagttattttttttaatgttttttttattatcgtttttttttaataggtcgtagtgtgtgttgtttttttttttgtgtttatgtgtttttattgtttagtttataattataagtgagaatatgtggtgtttggttttttgtttttgtgttagtttgttgaggataatggtttttagttttatttatatttttgtaaaggatttgattttatttttttttatggttgtataatattttatggtatatatgtattatattttttttatttagttttttattggtgggtatttgggttgattttatgtttttgttgttgtgaattgtgttgtaatgaataaatatatgtatatatttttataatagaatgatttatatttttttgggtatatattttgtaatgggattgttgggttaaatggtatttttggttttaaatttttgaggaattattatattgttttttttattggttgaattaatttatatttttattaatagtgtaaaaatatttttatttttttataatttcgttagaatttgttgttttttaattttttaataattgttattttgattggtatgagatggtattttattgtggttttgatttgtatttttttaacgattagtgatattgagttttttaaaatatgttttttggttatttgtatgtttttttttgagaagtgtttgtttatgtgttttgtttattttttaatgaagttgttttttttatgtaaatttgtttaagttttttttagattatgaatattagatttttgttagatcgatagattgtataaatttttttttattttgtaggttgtttttttttcgttttgatgatagtttttttttttgtgtagaagtttttttgtttaattagattttatttgttaatttttgtttttgtggtagttgtttttggtaattttattataaaatttttgtttatgtttatgttttgaatggtattgtttagatttttttttagggtttttttagttttgggttttatatttaagtttttaatttattttgagttaatttttgtgtaaggtgtaaagaaggggtttagttttaattttttgtatatggttagttagtttttttagtattatttattaaatagcgttttttttttttattgtttgtttttgttaggtttgttgaagattatatggttgtagatgtgaggttttatttttgagttttttattttgttttgttggtttatatgtttgtttttttattagtattatgttgttttggttattttagttttatagtatagttttaagtaggatagtttgatgtttttagttttattttttttgtttagtatttttttggttatataattttttttttggatttatatgaatttttaaatttttttttttaattttgtgataagtttttttttttaaattaatgattaaatgtttgagatatgatagagttttgggtgttgtagagaaaatagtttgagatagagaaaggagaaataatagtatttttgcgttttttttgtaaatatttttaataataatgttttttaataagttaatatagttgagaatatagagtaattagattaaatagttttaagattttagtgttataagaattatgttttgaaaataagtttttgttttgtttaagatgttttaaatttagtggaagtatgttttaagtgttaatttttttattgatatattatttttagaaaatatttgtttatatttaaaaaaaaatatatatatattgttttgtttatggagtagttatttttttgtttttttatttttttaataaatttgtttttatttagaaaaaattgtataattagattgttttttatttataaaaatgggaattttatattttagttaatatatttagtttagtataatgttagtaattttggtttgatgtagtagtttaaaatgtttaattcgaattgagaattaaattttttttaaaaatggtttaggggtattttattgtaaatttaatatttttgggtgtggtattgtatgagatgtggtagaagtgatttggatattattatagttttaaatagtattgttattatgtgtttttgaagtttttttttttttttttttagttgttttattttgttttttatttatatttgttattttattattggttgtttttttttattttttttttgttttatttattttgattagtgatgtgtatttttatttttgtgaaagtttaatttagttgtatgtgtggtaaaatgtaatattaaattttttgtaagaaggaattattttgtatattagattgaatattgtatatttgaaaatttagagagatgttagtgagttaaggattaaatgaattattattaattaaggttatttttattatattttggttttttttgttatatggttgtttatatttttttgtggtttttttttaatgtaagtagtttttgttaaggatttttgtaatgaattttggtatttttttttttttatttttataaatattaggtatattttaatttgaaaattttgtttaataaattataattatgtaattaaaaagatgtttaatattggtgtaaaatataaatttgtaaagtttttttgggttgttgtttagttatattttttagagagagagattttattttgagttttgtgatttttatttttttgtatttttttaaagatttgtataataagtatatatatatatatgtatatatatatatttaaaaaaaaattatttatttttgttggtttttaagttttttgtatagtaaatttttattgcgtttatttttttatgatgtatattacgtataggagttatttgtggtgtgggaggttgttatttatttatttttattgttgaaggtttatattttatgttataattttttattgatgtatattttttattgatgtatatgtggttgattttagtttttgttataaatattagtgtgtttgttttttgggtatataggtaagaaagttcgttagagtgtatggttaggagtgggagggttggacgatatgttgtatggattttaattatattagataatgataatatgatttttaaggtgattgtgttaatttaaatttatgtgttttgaaaatatttagttgaaggaattgagttaaaagttattgttttggttgtagaattatagtaggtatttttatttagattttgttaataattttttgttgtttatttgttttttatatattatggtattatatttttgatatatagatttagaaaatgtttattgatagtataattacgtaggggttatttaatatgttaggaaaattttataataaaaaggaaaaaatggaggaagggagagaaagaaggaggaattgaggaaggagtgaaagaagaaaagaaggaaggggaaggggaagaaaaaggacggaaaggaggaagggagaaggagggtgagagatagaatggaagtaaagagggaaggagggatagaaggaaagagaaaaagaaggaataaaggagaaaagaaattaaaataaagaaaagaataggcgttgggaattggaaattttttgtatggttaatattattaaaataggaggaaataaaatagacgtagttaatttttatagaataacggaaatgtaagaaggttgtattagttatttgttgttgtgtaaaatattatttttaaatttagtgatttatagtaataaatattggtgaatttaaaaatataatataaatattagtaaaatggagttaatgtaggtagaagaagttgaataaataaaaagattttatacgttggaataagtaagaggttattggtgtgtagacgaaaatgattttgtagtttaaatgttttaaaaagtaagtgttattataggattaaagttatagtattttattaggggatatatttgttagacgatatggtgagggaggtaggttattttgggaaaggtaatagaataagatgtaagtgtgatttttagtgatggaaagaaggaaggaaggattatttaatatgttttagattataggtaatttaaggagagttgagtaaggttatggaggagttttttagttatagttggttattagaggagttttttgttttttaggaatgttttgttttagtgttattggtgtgatttattattggttgggaatagtttatgggaagtagggttttagtattaatgttattgaggatgttagagtataggggtacggttttggaggattatttaggagtgtgatttaaattttttgttttgatgggtttgggtttttggaaattaaatttttttaggttgaattgttggataattttatttatatttgtaatggggtgagggaaaatagaaggtttttaggtggatttttggtttttatatttttgtttttattgtgtgaaagtagttatgtttttttttggggatgaggatttattatttgggtttggagaggaggagatttttttttttattaggtggtttttgggtatatattgtttatatttttttggtgatatatttaatgtgtagtttagtgggttgttttttgtttgtttttaagggtatttttttttgtaaattaggatttcgtattttgtatagtttagtgttttgagataaaatatgttaaatattttattacgtgaatttaaaatattagatatggagttatatttgtttttatcgtttgatttttggatttatatgtttttttttttgcgaatatagaattgtagagatatttttgatttaaataacgtattatgttttgaaagatggtatgtaatttttagagtgttttttttaggttggtatttagttgtgtttgtggaagattacgggattttaagtaattatgtggttttaagtgtttgtgtgatttagaaagttatagattgtataggttaaatagtatttattatgaggtgaaaatggtttatttgggttgagtttgaattttatgttgatatttatagaaaatagttaagtttgaagtgttattaaataacgaaatagataaatggaagttagttagtttttattatgggttagtttatgtatgataggatgggtatatgaatggaataattatagtggtaggtgtgaggttatatatggggtattttttgtggttggtagtttttggggagagtagttggtgatagggttagtggaaggaatagttatggaaatattgaattttttttttgttaagtgggttttttaggtagataatgggttaggagtataatttagtttgtagattaggaatgttaatagtatttagagaatggtattggttatgtttgagagtaggatagaaaaatttttttagaataggtatttaattttgtgaagatgaatttttggtttttttaggatggaagtaggtaaatgtagttaattttttagttaatggttagttatttaaagaaatagtgttttattagggtatattatgggtttaaaatgttgatgagttggatatttagaggtggtagtagttggatttgttttggtagggggaagttagtgttgttggtttttatgtttgttattgtggttgttttatttatgtatttattttattaggtttgggttgatttatggtgaaggttggttaatttttatttgtttgtttggttgtttagtgttattttagatttgggtgttttttgtgggtgtaaacgtgggatttaagtttaatttaggtggattatttttattttatgatgaatgttgttgggtttgtgtaatttatgatgttgtgggttataaaggtatttggaattatatagttgtttggtgttttgtggttaagttttttattaaattaggataaggaatattaaaagttgtttttaatagggggtatatgtttttgttgtggatgatacgattttattttagaattttaggttttttattgtgatttttttattggtgtttggtttagttttattttgtatttttttttattattggtattattagttttagggggtttgagggacgttggttgttcgtattatggtttggatttgttgtagggtttttttttgtgtaggttttatttgaagttggtttttttttatattatttagagtgtttgttaaagtacgtatttagatgtggaatgtggtgttgttagaatttaaagaggtttattaggtagtgtgtttttttttttttggtgaggatgtaagatgaaatagtttgttttttattttggagggaatatatttgtatttttttaaatatttggtatttgttaatttataaaattttattttagtggttatttttgaagttttgtaaggtttatttttatatattggagtgcgtgtgttttgttaatgattttagtgtattttttatttgttgtttatttatcgtagttaatatgaagttgttagtgaaatgagttgatttaatattttatagaatatttagtatgtttagtattgtttttagattatattatatagggtaggggagttataatagttttgagaaaaaattataaataaatgtgttgtggattttatatggatgtgaatcgttttatattttttttttaattggagtggaaagaaatgtatttattaaatttatagttgtacgttgtgtgttcgaggttttattattttgttttgtagtgatatttagataatataaaagttgtaattataatttttgtttggttagatttggagtaattttatttattttttagtttttattagggttttttagggataggttgttggattatgtagagataatagataattttaatattattttatattttttagttttttaatggtggtgtgatttttatattatttttagtgttttttttaagatatattttgggatatattatgattttttttttttttttttgttaggatgtgggtagcgttagaggtttttttttggtttttagtataatgagagttttgattttatagattagggatttagtgtgggggtgattttatttaatagtgtattagtgttaattatgtatttagggaattggaagataattagggttgggtttatggaattagtagttttattgtgggttgtaatgtgtttaggtttattttttgattttcgtaagttttattgtgatgggagatatgatagtgttgtgggtatttgggtattaatgttagtttttatttagtgttaataatttgattagttttgtattttttttttcgttagtgtataattttttgagtaaatggttataggtttttttgttgaaggattgagggaattgtgttagtatttatttttacggggttgtagggtattttttttagggatatggattttttttttgttattgggatttgaatttgaattttggttgaggtttaggtattgaggatgggattatgattttgtattgggttaaatatttttatttttttgttttttaatttttgtttttttattatagatattaagtagcgtttttgttggttttttgttttaattttgggataatattttttattatttttttttatattttttgtagtttgagttttattggttattttttttagtttgttatagtaattttgttttttggtttttttaggttattgttattatttggtttttgtgtttttagggttatattttttttagggttattaataaatgtaattttgggttatttttattattattatatttagtttgtagaggataatatttcgatattttttaatgatgtaggttttttttattattacgtttttgaggttttggtggaaggtgttttttttggattgttttgtggagtatggtattggtgggtttttattatgtttattttttttagttttgttattttattttgtgtaagttttagggtaattaagttacgtttattttgttgagagttaggtattattttttttagtttatatggatttattttagcggtgggtttggtttttcgtttattaaagttttggggtgtttgataaatttatgttttgagaaagtgtttttaagttaaaggatttttatttttttagattgaaattttggttttttgattaaatatttttaaattttaattttagaagtgttttttagttttttatggggacgtgttagttagtttttgtaaagttttttagtgggatttttgttgtattatgggggtgagatttttgtagtattttttagtataggaagtgggaattattattagagaagggtgagttttttatgtatgtttagaggattttggagggtatttatcggataattttgtttttgtttgtagaattttaggtttttttattagggttttgatttttttgtaataggtttgttttggttgagtggtaaatttttttggagtattgtggtttttataatgatgtttttagttattattttacggtatttgttttttcgttataagagataaagatttttgtatgagatattgtagaggttgttatatgtagttagtgatagttgttaataatttgtagatttttatgatatttttatagggtattattgtagttgagtagtaattagttaattttattgtttttgtaggtttttttttaatttcgttattattgtgtagggtattttattattttatttgttatagttttttttaattagggtatttttttagtttagtacgggtgagatttatagtagtttagttgtattttgtgttatggaatttttgtgttttttataattttggtggtatttttttggtttgttaggtagtgggtaagttttttttaaatttttatttttgtttgtttttatggattattttttatattatttgtgttagttagggttttttgaggagtagattttaatatagtatttaatgtgtaaggatttattggaggaaatagttatgagagaaatttaggatatagacggaaaatgttgggaatgttattagattataaagtaattttgaattttagtgaggtaaatagtgtaggaaggttagttggaagtattttagattttgtgtaggttaatagaagtttagtaagcgtggtaggaagttttagagttttagttagtttttagagaagaaatgtttttgttttagtttttgttttgttttttttagttattggtaggaaaagatagggggtaggtgtggttttagagtaaatgtggtaataggttttaggatttaaaagttgaggttattattaattttgtttattttagttgaggggttgggatgtgtatttttatgattgttataatgatttagtggggagagaggaaaaaggttgatgataaagagaaaaaaaggtattaattgatgaattgatatttttaagtagatgataagggatgatgtttggggtattagaagagggattggttttggttgggagtagaatggtttatttataatagttttcgatatggtaaaatatttgatatgtgttgtagttgtaaatgtatgagtagatggtgatggaatttgttttttaatgtgtttagtttttttagtgaggtaggaattaaggttgttagttgagataagaatggggaaggagggttggatgtgtgagtatagagagaaggtgtgtaagggttatttaggttaggaggaggttgagggtgagttatgtagggagagggtgattgttggttttggtgggggttttttatgtggtttgggttatgaagttagagaagatattaacgatgagggatagtgagtagatggtagaattattggattggtatttttagggtgggggtcgaaggattgttggaattgatgtgttaaagggtggattttaagtttggaatgtaggtatatatgtaatgagtagttattgatattattttatagtatatgataaagtgatagagtttgtgtttttagagtttgtggttattttgtatgggatgagtggaaagatggttagagagtgggaagtgtgaaattgagagtatggaagggttggggtttttgggtatgatgaggtttaggggatgataggggtatgagatttaggtagagagaggagaaggttatggaggagaggagttttaggatttgagagtttagggagtaagggtattttttttgttgtataggtgtttattgttgttataaaaattattataaattaagtggttttaaatagtatttaattattatgttatagttttgtaggttgtaagttcgtatagttttatggggttaaggttaaggtatgggtaggtttgtgtttttttttggggattttggggaagaatttatttttaagtttatttaggtttttgtttgaatttatttttttgtatatagaatagaggtttttatttttttgttaagagttatttttagtttttagaatttttttttagttatttatatatggtgtttaaggtatatttaatttttttgtttggaacgtttgatttttttttttttatgttttttttgttttttttttttgtagaatttgattttagttagggtaggttttttgtttttagtggtttatttgatttgattggggttatatagattgtttaggagaatttttttattttaaggtttttaattattattatatgagtaaagttttttttattatgtaatgtaatttgtttataggttttaaggattaagattggatttttttcgggattattatttaatttattatatgttgaagttattaatagttaaggagattgttggagagggtgatagtgaattaagagttataagagttaggattgagaggaaaggttaggggtttatagggaatggttataatgaggggaatgggggtttaatttgatgatagtttaggggttttagggaggagggaggtagaaagttttgagaattatagtgaggagaaaggattttattttatttttgaatttaggggtataagtttatgggggaaatttttttatgtgggaggattttggagggggttatgtttttagggagattaggttgttgttggagttgtgaggtgtaggaatattttgagggagggtgtggaggttttgttgattattgattgagattttagggggtgtattgggaagatttttgtggtttaggaggttggggagatagaatagtggtgtttagagttttgtggggatgtgagtgtagagtatgtgggggatttagtgttattgatataaatagggaaaggatatgatgagttgagttttggtggattcggcgtagataatggtgttgaggttgtgggagatgagggaggaggagtaggggtggtttttatttgggttttgttcgtggaggtgaggataatgaggtggttgtgttttagtgttgtgtggaatttgtttttgatttttttatgagtggatggtttgtttgagatagaacgggttttagaggatttatttattattttgagagagggggcgtgtttattttaggttttaggtttgttttgatatttttttttgtggtttagatttttttattgtaaattattgggtgttagtttattttggagtttataatttaaagtagaaatttagatggttgaaatgttatttttatgaaggatttttattagagtattatttagattgtttttgtaattttttatgtgttttgtttttttttttaaaaggttgttaattttgttttaaatttgtaatgtagttaatttatttttattgttaattagttgtgggttgtttaattttatattatatagttttatatatttataataatagtagtttgggttttttgtattttaatagttaagtttttaagttgtgtatatattgtaatttaagtatgagttatgtataatcgtagtattaagagataagagggaaattttttttttttaaaattttgtaaaagttttgggttttttttttattgagtgggaataagttagttaattatgaatatgaggtttttggttttatttaaaggtgttttagaagtattgagttataggaaggtttttttgtttaggtttaggattttatattatggtagaagttattttttattttagtgtgtagtgatgttttagatagcgaattggttagttattttttagttttaggtagttttgttttttaaaatatgggtttttattttaggatttttttgtttttagatgattaaaatcggggttatttatttttttttgagttatttttgtttggggggttcgtggttgtgttttttagttataatagaatatttttttagaatatttgtaggaagataatattttgttattggtttatatatgtacggtgtatgtatagagttttggttttagtttaggaggtgtgtggggaggaggtttattagtttaatagagtttggtattagtgtcgtatgttaggagttaaggttataaggatgtaaagtttttagatttattagagaaggtaaatttttgtagtatgtagggttagataggggtaagaaataaggttatttcgggttagtaggaagagagaaagggaaattatagacgtattttagagatattgtagatttggttttagattatggtaataaataagttatataaatttttgtttttttagtgtatagaaaagttatatttatattttattgtagtttattaagtgtatgatagtattatgtataaaagaattatgtatatattttaatttaaaattattttattgtttaaaaatgttaaggattatttgaggttttagttaattttaatttttttgttggggtacggttttgttttaatgttgatgattgttggttgattaggagggtggttgttaaaggtttttatggtaattttttaaaataagataatgaagtttgcggtatggattataaagggggaattagtatttaagtaaggttaatataagtttttaagttaggtggatttgaatatgaattttttaggtttttttattaattagttatagagttttggatatattttggttatagttggtttcgatagatatttttttagcgggtgagtgtttaatgaatttatttgagttagttgttttatttaattagtgatataattttttttttgtagaagaataagtgaaaaaaggtatagtgttaagagaattagatatacgatcggcggaaggttgtgttagtgttttaaagtaagttttgtttaaagcggtagaaatattttttatattaggaataggagttgtttgggattttgtttggggttagtttgagagtagagcgggagtgggggtttgggtagggttaggtattggagtgaagataggtttggagagagttttttgaaggttgttgagcggtttagatagttttttgttttatttgcgatagtttttttatttttttggttttttcggtgttgttttttttatttttttttgtttttttggtttttggtattttagggtttataaatatgttgtttttaaaattttaaggtaagtatggaagggtagaatagtttttgggatagtgggaagatgaggttattcgttatgtggttttaagtgttcgggtggaggagatgaagggattagtatagtagtcgggggaaatttttttaattttattttgtattatttttatttttgtagttttttgtttatttttaatttttagttttttttatttttattttagtttagtttttagggttttttttttttagttttttttttgtttagagtagtatagtttagagtttttgaataggaatttttttttatttaatagttaattatttattagtggggatagatatttggttgttttttttcggtgattttatatttttatttaaggtatttagatatagtttttgagttagggatttgtatttgttttttagaggtttatgtttaagataggttgttttttgggatttttattataggtggatttaagttaatgggttggaaaaagagaaaacgaggtcgaattttttatttattatgagattttgtaatataggttttaagggttttaatttttttattttggttgatgtttttttttttattttttttgattagggttttgagttttttatatagttgagttggtttaagttgaggagttgtttgtatagtagttggagttggattaggtttttttggaagggaaggagtcggtgggggtttaggttttggtgtttaagatttaaaagttaaagaaatagatgaggaggtattgagagagtttgggaggagagagtttgggaggggatatttaagttttttagtagtgtttatagtattttttatgtttggaattaatgtgtattatttttaggagttttaggattagaaatattttagtattttttaggttagagaaagtagaagagattttataaagggttggtaattggtaggtagtgggggagttagggttttgtagttttagttttatttttttttgattttatagtagggtattaaggttttataggaatttattttgggttatgttttaaaataattttattttaaataaaataaagggagagagtatttatatataatgtagatgtatttgtgttttatttttagttatgttaaaaattttgataattaggaatgggggtttaggagtggtgttgaggtagaggatagaagttagggggtgggggaagaggatgttaggggtggggttagtagagttttttttatttttaatttgtagtttttttttgaagcgtggttatatgttagaatgggttagttttttattgtgtttgtttaattaaggggaaaatgtggtttggtgagaataaggtatgaaaaggaaaaagtgaggtaggagtatacggtatatatgtagatgttggtgtattgtgtgggtttagaggatagatttgggagtgggggaagagatgtaatatgatgaaagaaaatagatattttatataacggttagaaaaatattttaatacggtattaaagattagggtgtatgaagtagttaagtgtttattatgtattaggtgtttatgataggattgaagataaatatattaaggaattaggaagaattaaagggttttatgatattagtatttattgtggaggagatgtttgttttattaggtagtttattattattgattttaaagcgatgttgtttatattgaggattttggtattattgttatttgatataaatgtgatggttaagttttgtgttatttggaaggggatagagggtaggataggattagaagatttaaagagggaagatttttagagggaaggatgaggatgtaaagtgtgaaaagatatagaaagtaaggaggtgggagagtgggtgtttttttgggtgtggggtttaattgttgtaggtaggttttagaatttttatgtatgttataggtaaaggtaatgtttatttgttttatgtttatggtttagttaaataagttggtagttaataaattgattttattttttggggttattttttagtaagtgtagaatagtaaaaaaatttagttatttgaggtgtatattttggttttttggttagtttttttaaggtttttattgttattttgtattttgggtgttttttatattttttaagtgtttagatgtgtgtgaggagttaagggtaggaagaattataggatcgaggatttaggtgtttttttttatttttgtaggtggtaaggtgtggatttataagttggtattgaagcgagttttgttttttgtgaatagttgtttggttatttatagttatagttgagttttgagaataagagaaatttgtttagaaaaagaaattgtgttgatttttaaatagatatttttggtttgcgttttattttaagtgtttgggaagagatagagtgtgaggtttaggagagaaggagaggtttgttttgatgttttgatatagtattaagaaattttttttttttttttatatcgtttcgttagtttttagtgagggatagatttatagtagtattgaaagggttgggaagagatggggagatatttggggttaatgtttaggggttgattttgtgggaggatatttgtttttagagttagagtttatatgtgatgatgtagagttgaagggtgatattagggaggtgatggagagtgttttggggttttttgattatgaagagtagaggttagtttgttttttgggtgaagtgattgttggggagattggattgaattaatgaagaataaataaacggggaatgaggataagtaagtattagtattttttattattagtttagattgaggggagtttggattgaattaatgaagaataaataaatagggaatgagtataagtaagtattagtatttttcgttattagtttagattgaggggagtttggattgaattaacgaagaataaataaacggggaatgaggataagtaagtattagtatttttcgttattagtttagattgattggggaggtgggatagttattgattttgttgcgtggttttttttaattttttggttttggggtatatagatgggtggtgttgtttttggttaaggtagttttagttttatttaggtaaggtagtggtggtagagagagttaggggagtatttgtgaaatcgattaaggtagagatgggagttttttgtgtagtaggagtggatgtaggatttgtttggaagtaagaggatgagggaatttagttgggttttgttttttgtttgtttgtgttcgtagggtaattagtaagggagttggggtagggaatttttttataggttatttagttagagatatgtttatagatatgtttttttatgtttatatttaggtttgttgttatatagatatttatttatgcgtgttttatgtttgttattttagaatggtttagttataaaattttaatttttttatttttgttgtttttttatatatatatatatatatatttatatatatgttatgtaaatatgtttatttgtatttataaagagagatgttattttatttttaaatttttaaattcgtatatatttatggggtataggtgtagttttgttatattgttatattgagttgtggtaaagttagggtttttagtgtatttattattggagatagatatattgattttaataagaaatttttttacgatatatttattgttaattatttttatttttttgggtttttattgtttattattttatacgttgtttttatgtatataaagagatattaattagatatattagagtgataatttgaattttattgtattatttttttagtttttttgtatatttgaaaatatatataattataagttggaagaatgagggaaaaaaaagagcgagagagagtgttgaatttgaataggttaggggttgggttttattaggaattataattgatttttgttattttgaaagtgtggttttttgagttgtttttagagagttttggagggaaatttgtttttatagtaatattaagatgttatttgtttgttttattatgttgatttttttattaatgttgtaaatgttaaggtcggtagtatatttagtattttagtagaattaaggtagtggttttaaattgtagttttatttaagaatgtttttgatggagtagtaaaatatttatgtttattaaattttgatttttgagtatatgtttttaatattttttgtgagaaaatgggagatatgtaaagagaagtaggatagtagttttgagaaagggtatttgtgtagatttagttatgagtttaattagtagattttttttatttattgaaagataattgtattatttttagtttatggaagtaattatgaataattatttttaggagtattatgaataaagttgtaagagtatttgtatataggttttttatgaatataaagtttttttttgtttgaaataagtgtttaggagggtaatttttagttatatggtaaattgtatgtttagtttgaagaaaattgtaatatttatttttagagtggttgtattattttaaaatttatttttattagtaatatgaatgatttagtttttttgtaattttgttagtatttgttgttatttttattttgtattttagttatttttattattgtagttttaatttgtatttttttattggatagtgatgttgagtgtttttttatttgtttgttagtttggtgtttattttttttagtgaaacgtttgtttatgttttgtttattgtttattgtttatttggattttatttttattgttgagtttttatatttttttatatattgtgaatgtaagtttttattgaatatgtgatttgtaaatatttttttttattttgtagtttgtttttttatgttttttataggttttttatagagtaatagttttaattttgataagatttagtttagtaatttttttttttatagattatatttttggtgttatgtgtaagaattttttgtttagttttagttttgatggttttttgttaaaagatttgtaattttaattttttaatgtatttgttatttatttaaaaaaaaattttgtttaggttggttttgaatttttgggtttaagggatttttttattttagttttttgagtaggtgagagtataggtttgtgatattatatttggtttaatgtttgtaattttaattgtgtgttttatattaaagtttgtgatttattttgagttttttttttttgtataaagcgtgaggtttgggtttagtttattttttttttattgtggttgtttagttgttttagtattatttgttgggaaagtttttttttttttattgaattgtgtttgtgtttttgtaaatgttagttgagtatatttgtgtgttttgtttatttttagttgagttgtttatttttttatatattgagtttaagaatttgttatattattttggaaatatgttttttaatataaatgtaatttgtgataaattgtgaaatattttttttttgtttatggtttgtttttttatttttttaatgttttttggagtatttaagttttaaattttaattaagtttaattttttttttttttttttttttatttgtagattatgtttttggtattttatttaagaattttttgtttaattatttaaagtaataaaaatttttttttgtgtttttttttagaaattttatagttttaatttataaattttagttgtttaggtttttaatttgtttgagttgatattttatatggtgttaaatgtaatattgtgttatttatgtaattttattgaaaattaattgataaagaaagtaagaatatttttttagatttttatttttgtttattgatttttatgttttttagttttatattgtttggattattgtagttttatatgatattttatttttttttttaaatttgtgttggtttttttgtattttttgtattttaatatatatttttaggattattttgttaatttttttttttttttttttttttttttttttttttgagacggagttttattttgttatttaggttggagtgtagtggtatgattttcgtttattgtaattttcgtttatcgggtttatgttatttttttgttttagtttttcgaggagtttattattacgttcggttagttttttgtatttttagtagagatggggttttatcgtgttagttaggatggtttggattttttgattttatgattcgtttgttttagttttttaaagtgttgggattatcggtatgagttatcgcgttcggtttattttgttaattttttataaaatttttgttgggattttgatagggattgtgttgaatttatagatttattgggggagaattgttattttaatagtattatcgagttttttaattcgtatttttttatttatttagatttttaatttttttgaggaatgtttttttatttttagtgaataaatattgttgtttttttaaatttatttttatttcgtttttttggtaattattgtgataggaaagttgagatttttattgtttttatagagaaatatgttaataattaatttttatattgatttgatattttatgggtttttttggatttatttattagtgttagttagtttttatttgtttgtgaattttatagatagggttatgttatttgtgaatagaattgtatgtttttttttttatttggatgtttttaatttttaattttttgttttattgtattggttataatttttagtataatattaaataaaagtggtgggattggatatttttgtattgatttttattttaggagaaaagtatttagtttttagtttttttttattaagtttgattttagttgtgggttttttatagatgttttttattagagtgaagaaggttttttttatttttattttgttgaaatttatgaatatgagtgatgttaatatttttgttaattgttttttttgtattttttgagataattatgtttttttttttattaatatagtgtattttatgaattgatttttaaatgttaatttaattatatgtttttgggatgaattttattggttatggagtgtaattcgtttttatgtggttttgtattatttgttaatgtttgttaaggatgtttttatttatgtttattggtgatattggtgtatggtattttttttttgtgagttttgttgtgattttgatatgagggtaatgttagttttgtaaatgggttggaaagtttttttttttttttttttgtttgaaagagtttttaaaatatttgatagaatttattagtgaagatatttgggttttggtatttttttttgagaaggttttttaatttttgatttagtttatagttttttttaggttttttagttaatttgggttagttttggtaatttttatttttgtacgaattggttttttttatttaagtggtttaatttattggttttaggttttttagagtatttatttataatgttttttaattttttaagggttattagtgataattttttttgtttataattttggtaatttattttattttttataatttttttttttattgttggttaagaaaatagatagaggtagtagatggagatgtgatagattttttagtgggaaggttttgattataatatttggtaagttagaatgatgttagtaattttaaaggagttgttaatggattttgataggaaaattattgattttggattgggttatgtttaattaggggtagatgttaatgttttaagggttatataaggattagaaaagaagaggttgtattaatttggattgtcgagttatattattttatataagaaaatatatttgatagttttaaacggttaataatgtagagggatatgttttttttaggggaaaatttgatagaaaattgaaatggttaattgaaatattgtttgtttaaaaattgttaatttaattgttgggtaatataaatatgaaggattggtttttatatttttatgaatgtgttcgttgttaatatgagtggggttgtaagaataattttattaggtagtatttttttttttatttgatggattaggacgatgttgttacgacgatatatataatttttttgaaggggagaggatgttggaataaagattatattttattttaaatttatttttttatatgttatgttatagtattaggaatagggatgtaaataaaagtgttagaaataggaattatttttaagcgaaaaattataattatatttttatatttttatgtaagaatttttaagtatttattttatttgaaaagttaggattaatagtaagtagagttatatagtttggtggtttgatagtttttattagttttttatttatataatttattttttatgattaagattagattgagggaagatatgttagaatattattgttgtttgtagtttaggttagtttagtagataaatttaatgttatttttaaatttggaaataattgatataaagggatagagggaggaatagtggttgagggtaagtgaataaattaaagggttatataatgagaaaaatttaatattagtttaattttttaaaggtggtgtgagtaagagaagatattgttatttaggttaattatacgggatgtttaaaagagtgaagttgtatgtttttgagattatttttgtttttggaatttggtaagattgagtgttgttagtaaagttgagtgattttattttgggagatatatttatataagaggatgataaattggtttaattttgaatgaatggatgagattttgataatatgttaatatttttttattgttataatttttttttttgtaaaagatatgtggttaaagaaaagtgggtaatttgagttattataaaaatatttagtttttgtttttggttttttttaaaaattttagatttttttgagtgataagagtgtttttagagtattgatgagaagatttttggttgagtggattttggatattttaagaacggtggttagttgttagagatatatatttgtgatgcgagggttatttttttttattttgtgttgttataaagaaatgtttgagattgattaatttatataaacgaggtttatgtggtttaagattttgatgtttggaaatgtttgcgtatttagtgagggttttaggttgtttttatttatggtagaagataaaggggagttggtatatgtagagattatatggtaatagaggaatatagagagtaggaagttgttagggtttttttaataattagtttttttggaaaataatagagtaataatttatttattttcgagagagggtagtatttttcgatttataaaagattggttattatgatttaaatggtggttattaggttttaagttttatagtgggcgttagattttaatatgaggtattaggggataaatgtttatattattgtattttttttttagttagttaaaggttatgttttttttatattgtaaaatataataatttatttttaattgttttaaatgtgttaggttgttttagtattaatttaaaattttagagttttatttgagacgtaaggtaaatttttatagttttgagtttgtaaaattttttaaaaaatgttatttgtatttaaaatattaataaaatagtggaagagatattttttgtatatttttattttaaaaggtatataaatgggttaaaagaaatgaatgtagtttttttataagattgaaatttattatggtagatattaaaatttaaaggtttaaaagaattttttttgattttatattttgaatttagagtatagtggttggtgtaattgttgggtttttaatgttatttgtagttttatatttatggttttgttgaatataatttatatagttgttgttatgggagaaaattgaatgtttatggtttttttaggttgaggttgtatatagttagtggttttattatttagtagttttggtaggggttttgttgttgtagtttcgttaagaatttttttgggtattaaatttttttatttaaatattagttttagttttaggttatttttttgtttatatatatgtatataggttattataggtagttagattaaattttgaattttatgttattgagaaattttttttattagatatttttaattattatttttaagtttaaagttttatagatttttagggaggtggtataatgtttttaagaattattataagaatagtatgaaagagatgattttaaattatttatgaattatttatttttatgagttaattacgttttattaagtattatttttaatattagggattataagtgagtatgagatttgggtggggatatagatttaaataatattaggggttatggtggatatgagggtgggttggtttttttattttttatatgttattagggatatagatatatttagatgttttggtagaaagagaaaatagaggtttttgaagttttaaagtggagttatgaataaattttgtattttagttttttataaggtagttttggaaagaaaatagtcgtgaataaatttaagttagttatggtaagtggtgatattgaatagtttattatatattgaaaaattttaaattaaagattttttagagtttagttgtgttttatttgttttaattttttttttattttaggttttttaaggtgttatttttataagatttgagagatatattagagttttgggtattgtttttgtttggggtggaataaaaataaagtttggttagagtttataggtgatgtgattaaaggaggaattgtggggtggtgattttttttatgggtttttgtttatattattttaaggattttaggaattatttttttatttttattatatttatttgaagtttgagtatagttgattttttttttatatgaggaaagaaaataaattgtgagaggttagggaagaggtagggttatgagattttagaggagtttttagaattgtgattgtagatttaggttaggattagaaaattcgagggaagaggatgtgttgaagttgaattaaatgtttttttgatatttgtttttagtaggaatatttttttgatttgtgattgttgggagttaggtttttatgattataattaaggtgataaatttgttttttaattttataggtgttttataaaagagtgagagttgatagggtatttgaatagggtaaatgtgtgtggagatggtgttttataattaggtaggaaatgagttaatttttatttggagtttgaaatttacgaatggaagaagaaattttggaatttattttttttttatttggggttttatttttttatattatagtagtgattatagtatttagaataattaggacggtaacgatgtttatgatgaggaatgtgggttgggaagatggttttaagaaaggaggggaacgtgaggggttttgatttttaggttttagttttgattttgttgaaggtttttagaagggtttttgttttttttgagaagagatatggttttttatttatttttttagtttattttagtgtgaggggttttggtagtgttttttgttgtatatggtatgtgtatttttatttgtttttagaagatagtattatagttgtttatttttggaaggttttatattttgtaggtttggtttttataagttttgcgttttaaatttggttttttttattttatagttgggttattgtgatttttatatggtagaagttcgggatttagtattttagggcggttttatggttcgagatggggtagtggattatatatgtattttgggattttgaagggaagagtaagaaaattgaggtattttgtattttttatgggatattttagtagtatttatgtgattattttgagaatggataggatatttggggtggggaagggagtatagaatttagatattttttggttataggtatttgggataattttttattttttggaaagttagtgtttgaggcgttgaataatttagagtttgtagagtgtttgggattgtaggcgcgtattattatgtttgattggttttcgtatttttttggtggagacggggttttattgtgttggttaggttggtttttagtttttaattgggagtgatttgttagttttggttttttgaggtgtcgggattgtagacggagttttttttatttagtgtttaatgttgtttaggttggagtgtagtggcgtgatttcggttcgttataatttttgttttttagttgtttgttttggttttttaaagtgttaagatcgtagtttttgttcggtcgttattcggtttaggaagtgaggagcgtttttgttcggtcgtttattatttgagatgtggggagcgtttttgtttcgtcgttttgtttgggatgtgaggagttttttcgtttagtagttatttcgtttgggaggtaaggagcgttttttttcggtcgtttcgtttgagaggtgaggagttttttcgtttagtagttatttcgtttgggaagtgaggagtgtttttgttcggtagttatttcgtttaggagggaggtggggggtagttttcgttcggttagttatttcgtttaggaggtggggggcgtttttgttcggttatttcgtttgggaagtgaggagtttttttgttcggtcgttatttcgtttgggaggtgtatttaatagtttattgagaaggggttatgatgacgatggcggttttgtcgaatagaaaggggggaaatgtggggaaaagatagagaaattagattgttgttgtgtttgtgtagaaagaagtagatataggagattttattttgttttgtattaagaaaaatttttttgttttgggatgttgttaatttataattttattcgtaatttcgtgttttttgaaatatgtgttgtgtttatttagggttaaatggattaagggcggtgtaagatgtgttttgttaaatagatgtttgaaggtaaaaaaaaaaaaaaaaaaaaaaagaatgtttaaaatgataattttttgatttaagtatttataaaaatatttgtttaattagggtgttttgtaattagaaaaatgtgagttttatatttttgtttgtataattggtttagtattatgataatgatttggtttgatgtggtaggtggaaatggttaaatttaatttaggaataagattttttagtaattggttatttagtgggtattttgtgattagtttaatattttttattgtggtttttaattagatgtggtagaagtgatttggattttagtatgattttgaaaaatattgttattttgtgtttttaatgttgttttaaaagtagttttttcgtgttttttatttttattgttattttattattagttatttatttatgtttttttatttaatttattttgtttaataatgttttttttttattttgtaaaagtttaatttatttgtatgtgtggtaaaatgtgagtaatatattaaatttttaaattttttgtaagatattattgttttatttattagattgaatattgtgtattagaaaatgtagagagttgttaattagttaaggattaaatgatttatttgtagttaaggttgttttttatggtattttggtttttttatatggttttttaaaattggttgtggtttgttttttgtggttgtttgtttgtttgttttgagatggagtatggttttgttatttaggttggagtgcgatggtaggattttagtttattgtaatttttgttttttaggtttaagcgatttttttgtattagttttttgagtagtttggattatagatacgtattaatacgtttagttaatttttgtatttttagtaaagacgaggttttattatgttggttaggttggtttcgaatttttgatttcgtgatttataggtttcgattttttaaagtgttaggattatagaagtgagttatcgtgttcggttagttgcggttttgttttattacgagtagttatcgtaaaggatgtttgtgatgaattttggtattttttttttttttttatttttaaataattaattaggaatggtatataaggtgtattttgaaaaatattattttaaagatttgtgggttaggagtggtggtttatgtttgtaattttagtaatttggtaggttgaagtgggtggattatttgaggttaggagttttagattaatttggttaatatggtgaagttcgtttttattaaaaatataaaaattagttgggagtggtggtatttgtttgtaattttagttgtttaggaggttgaggtaggagaattttttgaatttgggaggcggaggttgtagtgaattgagattatgttattgtattttagtttgggtaataagagcgagatttaaaatatataaataaataaataaataaagttttatgattaagtaattaattatttggatatttttttttggtataagaaatagaatttatgaagttattttaggttgttgtttaattttattttttaaaaggaatttatgttttgagttttgtatttgttattttttggtattgttattgaagatttttataataatatttaaattatagtttgatttgtatttttttaatttttttatatagagaatttatatcgtatgtatattatgtgttggggagttatttttgatgtgggagggtgtttatttttttaatttttttttttttttgagatggagttttatttttgttgtttaggttggagtgtaggggcgggattttagtttatttgattttagttgtttggtttagttttatttagtatttttttttacgttgttatttttagtattaggggattgagagttgatgatttggtatattatcgtttggatttgttgtagtgtttttttttgtttagttcgtatttaaagttgatttttttttatattatatttagatagtgggttaaataatatatttagatgtggaatgtggtgttgttaggatttagagaagtttattaaatagtgtgtttttttttttttgttgaggatgtaagatgtaagtttgttttttattttggaggggatagttttgtatgtttttaattattggatttataatattttattgtagtggttatttttgaagttttgtaaggttaatttttattttttgtagtgtatacgttttgttaaagaatttagcgtatttttttttttttatttatttattttaatttatgtgatattgttaatgaaacgaagagatttagtattttgtgagatgtttgatttgtttagattttttaaggtgatatttatagaaggttgaggagttaaagtagttttgaggtaagttattaataaatgtattataaattttatgtgaatgtgaattattttatatttattttttaaatggaatgggaaagaatgtatttattaaatgtatggttgtttgttatgtgtttgaggttttattaatttttttaagtagtgatatttagttagtatggtagttgtaattaggatttttatttggttaagtttggagtaattttatttattttttattaggtttttttagggatagattgttgaattatatggagataataggtaattttaatattattttttattttttagttttttaatggtagtgttatttttataatatttgtagtatttttttgaagttttatttggggtataatattgtttttggtttggttgggatgagggaagttttagatgattttttttgggttttagtataatgatagtttttattttttagattagggatgtagtgtgggggtgattttttttgttagtgtattaaggttaattatgtatgtggagaatggggagataattaggattgggtttatgaatttagtggttttatagtgggttataatgtgtttaggtttattttttggtttttttaagttttattgtagattttgaatttgaagtttggttgaagtttaggaattgagattgggattatgattttgtatttgattaaatatttttagttttttgttttttaatttttgtatttttattatagatatgaagtagtgttttcgttggttgtttatttgttttgacgttgggatattattttttattaattttttttaaaattttatgaaggttgagtttttttggttgttattttgggtttttatagtaatcgtgttttttattttttgtaggttattgtaaaggagggtttttaaagtatttatttttgattttgagggaggtgggtgtatttattttaggttttaggttcgttatagaaaagtaaaaattttttatatttaaaattgttttgggttatatttagtttgcgagttacgggttagataagttagtatttagaatatatgtattataatattagaaatttttttgtttttattttaatgatgttttttaaacgtaaaagtagttatatttttagtagataataaatgttagttgaatgaatgattattgtagagtatttttttattttaaagttaatatttttgttaaggtagttttagggtaaatgttgttttgtggtagttaaagaataatattattttatgtggatatcgatgtcgttagtgttttttttattaggagtgtttgtgtgttttttttttttttttatttttttttatattaatttttttgtatattgtagtatataattatatttttttttttaggaaagataattttaggtttatgggtataattttttaattacgtatgaatttaaattagattttgttttgtaaatttatgagtttggattggagttagtattaggattattataatttagggtaggaagaagagtaggagagtagaagaggagttttaatagaaagtttattatgatgagaaattatgggattttttttttttgtaaattttagaatttgttttttttaaaaagattggagataagatgaaaattataatttaggaaagagttttgggaggagggtaagagttggataggtttgaaaattagttttttgatattataatgagatttgtatgtagggattatcgtaggtgatatttaagtttttgtgattataggtggtggtgggataaggttttattgaagggttaaggagaatgaaggagtaaagatgatttagttgagtagtgattatataaagtttatattggtttgagtatttattaggtatagttttatttattttttttttttgtaataaattagtataagaaatatatggattttggaaggtttttatgggttttatttattttgttttttaaattttaggaatttttttttttaattaagttattaattttttatggtaagaatttgaaaaagtaaatgtttatttagattttaattttaagagggaagtaagaagttatagtttagtgtatataaagttgagaaaaagatggagatattttagtttcgtttttttggaataggaaagatgattggggagggaatatagattagcgtggggaagagggttatggtggatatgagggtgggttggtttttttttttttatatattatgtttataggaatatagatatatttaggtgtttttgtagaaagttagggttttttaagttataaagggaaggtgtgaataaattttgttttttagttttatataaggtagttgttttatattatagaaaaaatatttatgaataaatttatatttgttttagtaatggatgatattttggtagtttatcgtatgtttaaaatattaaatttaaagaattttatagtatagttgtgtttattgtttttttttaatattttttatatattaggttttttaaggttttattttttacgttgtgagagatatattagagttttgggtattgttgtcgtttggagtagaataaaaataggatttggttagattttatagtagatgtggttagaggaagaattgtggggtgggtgagtttttttatgggtttttaaatataatatttaaaggattttagggattagttttttttatatttatttgtagtttgagagtagttttttttttttttatttgtgggaagaaaatgttttgtgagatgttagaaagaagttagggttataaggttttagaggaatttttaagttttggattttagagaagtttttagaaatgtgtaattgtagatttagggcgggattaggaaatatgaggaaagtagatgtgggttttggattaatcgtttttttgaggtttgttttcggggatttttttttgtgatttgtgattgttgggattaggttttattattatagttattaaggtgataaatttgttttttattgtaataggtgttttataaaagagtaagtgttggtatatagggtttaggttgggtaggtttatgagtgtggatggtgttttttagtaattaggtagggtatttttatttggggtttggaatttttagtgagataagaaattttagattatattttttattttttttttatttgagtttttttttttttatattatagtagcgattatagttttagtgattatagttataagtagaattaggttagtaacgatgtttacgatggggatggtgggttgggaagatggttttgggaaaaggggggaaggtgagggattttgattttgttaaagttttttagagaggttttggttttttttaagggatatgatatttttatttttttttttattttattttagggtgaggggttttggtagatttttatgttgtatatggtaggtgtatttttgtttttttttagaaggtattattatagtcgtttatttttggaaggttttattttttgtaggtttggtttttacgagtttcgtgtgtgggtttggttttttttatttcgttgttaggttagtgtgattttcgtagggtagaagtttagggtttagtattttagggtggttttatggttagagatggggtggtgggttatatgtgttttgggggggtttgacgggaagagttagaaaatttaggtattttgtatttgttatgggatattttattagtacgtatgtggttattttgagaatggataggacgtttggggtggggaagggagtatagaatttagataatagtttggatataggtatttgggataattttttatttcgtggaaaattttagtttttgaggagggaatagcgatttttggttttgatttgagtggaggttgagggatttagaagagttggatttagatttttaggtatattgagtgtgaagtagagaataaggtttgagaggaaaagttacggggtttaaggttgttgttagcgttaaagggaattatttattagtattttagggattgttttttttttatttttttagagattttattttttaattgtgttagagagtacggcggatttttagagttattttttggaaatttaggaggattttttttttttaggattagagggagggcgatattatagtgttggttttatttgttttttttttttgtgggaggttagtttcggagatttataggttattcgggaggcgttttgtggtttttggtattcgcgcgttgtagcgtttttttttcgttttttaggtatttgcggagttattttacgaattcgttttttaggtagatttttcgttgtttcgttcgacgggtcgttttttatttgcgtttggtgatttgagttgttatgttcgtcgcggtttaggagcgtaggttttcgtttagagcgatgtaatttttgtcgtcgtaggcgtgttgtttatattcgtagaggaagcgttcgtcgggttttacgtcgtagttatatattatttgtatggtgtgagaatttggtttcgttttcgcggttagttcggtttttcgagtttcgttttgttcggattaattcgcggggattttggtttaaattgaaaatgaaatcgggtaaaggcgtttgggttttttttaggttaagggtttcggggtttcgcggtttcggggaggatttcggatttagagattcgaggcgattcggtttttcgtgggggatggggaggggtcgtgatttgcgtttcgggtcggggttatttatcgttttcgttttggttgtagtagcggagcgcgattcgtaggttttttcgtttagttcgtgtttgggttttgtagatttgtgtgtttcggttttaatatttcggtttttttcgttttatttacggcgttcgcggtttttttttcggattcgcgtcgtcgttgtcgaatcgtacgaattgcgtatcgtttacgtagtcgacggagatgaagcggggtttttcgcggtcgggtcgggatatggtggtgtagaaatattttatggagtgggagtttgggagcgaggaggagttgagattcgttcgatttttttttttgcgcggttttttgggttttgcgttttcgtcgggcgggtttttcgtttttttcgattatttttttgtagattttgtatttacgcgtttaggtttgggttagggttagggtttttgagagtagtaggaggagggttcggggcgttatgagtattattttcggcgtttggggagaatttgagtttcggtgggtgcgtggggattttagaatcgggatcgcggcggtatcgattggtttttttagaaattcgatatttagtgggaatgagaattgtgttcgtttcgtgagtatttaggaaaaaggattcgtcgtaggttgtgagaagaagagaaattgcggaggtggcgaatttttaaggcggggtttttttaatttatatatcgttttcggggtttgagattttgagagttacgtttggttttgggatttcgttttgatttcgttttttttgtgttaagcgttttgttttagtgtttttttgagttttggtttaggagttgtttgagaaattaggaagaaattttcggtatgggttttgtttttttttttttattttttatttaggaattttcgtttttgaattggattttttgtttatttggatttttttagaagaaaagttatttacggagtttggtgatagagagtgagtttgttttgggaatggaggtgtagaaattgttttttgtttttttttttttttttttttttattgggaaaagttgtgtttgagtgtatgagatagaatagagattagtttatttatttatttgtttattaaatatattggatagtagaattttggtaatttttgaatgattaggaatttaatcggtaaaaaatgtgattttggttttatgatgtataaatgtgtttaaaagcgttataataggatttataaagtttttaagttttatttttgtagtgtatttgtgattttcgtttgttatattttaaatttgttattattttatagttttgagtttttgtgtgagtttaggatatttttttaatataaagtagtatattgtgtattttgtaattaggtagttgtaattaggagttagtataggttttatttattttaaagttgtaattgtttaatgtagttataatgttttttattagtgtttatgtattgtttgtttttaggaagtatttattgttaagtgttgtgtatattttataggaatatttagtaatttttaaatttgattaatattaaaaaattagtttttaggtagatttatatgaggtattaaaggttaattgttaaggatattttgttaggttttgtagatggatgtattaaaatttataaaataatgtatttaaatttaagaattttgttgttttcgaatttttttttttgttttttttttttattttttgtttttttagttttttttttcgttttttttattttttaggtttttttgtttttttagtttttattatattgttatttgtgagttgtgatattagtattgttttatgatttgttacgtgattgttttttttatagtggttttgtttttgggagtcggagtgtgttatttttttatttaaaatattttagtgtttttatttcggttttgagaaatttttggagtgttaggtacgtgagtatatgaggggatatttggtttatcgtagggattaaattaatttttgtcgattgaatgaatgaaatatgagtgtattaaattgtattatagataattataaagtgtaaaatacggaaaaagtttagaaaatttttattttatgtaattagtgtgtatattaatttattaatttattcgtgtattattatgtttggcgaaataatatttatttatttgtttatagttttttgattagaaatttgggtaaaattgtggatggaattttttttttgggtttttaaaagttgtgtttttattttgaatatttttttaggtttatatagaggtggtagaatgtagtttttggtagttgtaagattgaggtttttgttttttgttggttgttaatgtagagaatagggagggttgtgttcgatttttggtttttattagtatttttttttatatagtttttttattttttattttatttatttattttttggagatggagttttgttttgtagtttaggtttgggtgtagtggtcggatttcggtttattgttagttatggtttttaggtttacgttatttttttgttttagttttttaagtagttgggattataggtattcgttattatatttggttaatttttttttttttttttttttgtatttttagtagagatagggttttattatgttagttaggatggtttcgattttttgattttatgattcgttcgttttagttttttaaagtgttgggattataggcgtgaggtatcgtattcggtttatagtttttttatttttaaagtttatgttggaggaaattttttatgttgagttttttttatattgtgagtttttatgtttaggaagaatttagtttttttaaggttttatttgattaggatagtttaagtaggataaatttagtttaaagttaattaattgagatttttaattatatttattaattttttttatagtagtatttatattagagttgattgaataattggaggatggtgaatgattaggagttggttgttgagggtataatagaattagtttagtaagggttggattttttttttgtgtttatttcggatatagttggaaattgaagtttaagtaaagtgattattgtgaatggttataaaatatattttttttagttatggaaattttttttattttttaaaattaagttatatgtttaatattttataattaatttacgttaggtatggtggtttatatttgttattttagtattgtggaaggtagaggaaggtagatttgttgattttagaaggttaagattagtttgggtaaaatttttatttatataaaaaattagaaaattagttaggtatagtagtttatgatggtagttttagttatttaggaggttgagattagtgggttttttgaatttaggaggtcgatattgtagtgtatggtgattatgttattgtattttagtttgggtgatagagcgagattatgttttaaaaataataatgatgatgatgatatatttaaagtaaatgtaatttaatgtgtaataatatatttttttttgtgaaaatgtgttatttatttattattgtataataaattatgtaaaatttagtttaaaataataaatattttttatttgttatagtttttaatggttaggagtttaggagaggtttttttgagtgttttttgtttcgggttttttataaggttgtagtttaattgttagttaagggttgtattatttgagggttttattggggttgaggatttatatgaaatatggattagttatatggttgttggaaaaggtttagttttttgttgtttggtttcggaaggttttagtttttagttatatggatttttttgtagggttgtttgtggtatagtagttggttttttttagagtttatgattttagagatagagagagagaaggtggaagtcgtagtgagttttaggttttatatttagagttataaattattatgttagtattattttataagttagaagttatattagtttatttttatattgttatgaagaaatatttgagattgggtaatttataaaggaaagaggtttaattgatttatagttttgtatggttgaggagtttgttttaggaaatttatagttatgatagaagtggaagtaaatatatttttttttatatgatgataggagagagaagtgtagaatgaagtagggaaaagttttttataaaattattagattttatgagaatttttttagtattacgagaatagtatgggggtatcgtttttattatttaattattttttatgtggttttttttttaataggtagcgattataattcgtataataatttaagatgagatttgggtgggaatatagaattaggttatattagaagtgttttattaagtttaagttatatttaggagagggaattaagatgtatttttggaagggaatagtattaaatgttttgaatatatgttaaaagtaaaattataattattgttttaggtttttgaaaattaaagattttttttatttaattattttttattaatttttttagtttgtttttttttttaagtttgttttttaatttaattttttttaagttttagggtatacgtgtaggatgtgtaggtttgttatataggtaaatatgtgttatgttggtttgttgtatttgttaatttattatttaggtattaattttggtatgtattagttatttttgttaatgatttttttattattattttgttttaataggttttagtgtgtgttgtttttttttttgtgtttatgtgtttttattatttagtttttaattataaatgagaatatgtggtgtttggtttttcgtttttgtgtgagtttgttgaggataatggtttttagttttatttatatttttgtaaaggatttgattttatttttttttatggttgtataatattttatggtgtatatgtattatattttttttatttagtttattattgatgggtatttgggttgattttatgtgtttgttattgtgaatagtgttgttatgaatgtaaatatgtatatatttttataatagaatgatttgtatttttttgggtatatattttgtaatgcgattgttggattaaatggtatttttgattttaaatttttgaggaattattatattgttattgttttttataatggattaattatttatttttttattaatagtgtaaaagtatttttatttttttgtaatttcgttagtatttgttgttttttgattttttaataattgttattttgattgatatgaggtggtattttatttgtggttttgatttgtatttttttaatgattagcgatgttgagtttttttttatatttttgttggttatatgtatgttttttttagaagtgtttgtttaagttttttgtttattttttaatgaagttttttttttatgtaaatttgtttaagttttttgtggattttgaatattagatttttgttagatggatagattgtaaaattttttttttattttgtaggatgtttgtttattgtgattgatgatagttttttttgttgtgtagaaaaaaatgtttaattaaattgttttttatttataaaaatgtgaattttatattttagttaattttattttattttagtaaaaattattagtatgatgttaataattttggtttgatgttgtagttcgaaatggttagttttaattgagaaataagttttttttaaaaattggttatttgatgggtattttataataaatttaatattttttgttgtggtattgaatgagatgtgatagaagtgatttggatattattatgattttaaatagcgttgttattatatgtttttgaatttttttttttttttagtagttttattttgttttttatttatatttgttattttattattgggtatttttttttattttttttatgttttatttattttgattaatgatgtgtatttttaatttgtaaaagtttattttagtttaatgtgtggtaaaatgtaatattaaatttttggaagatgaaattattttgtatagtagattgaatattgtattattgaaaatttagagagatgttagggagttaaggattaaatgatttatttgtagttaatgttatttttatggtattttggttttttttgttatatggttttttataattttttgtggtttttttttaatgtaagtagtttttgttaagaatttttgtaatgaattttgaaattttttttttttttatttttataaaaaataggtatattttaatttggaaaattttgtttaaggaattataattaagtatttacgagggtgtttagtattggtgtaaaatataagtttgtaaagttattttgggttgttatttagttattttttagaaggagatcgttgggagtaagttttttaaaatttggttataaattggttttaagattggttataaataaaatttttgtagtatcgtaatatgtttataatggttttaatgtttaagttggaaggttgtaggtttataagaatgagggaaaggaatatttggtttgtttagggcggaaaatcgtttaaaggtatttttaagttataaataatagtatgagcgatttgtgttttaagagtgtgtttttgttgtagttaattagtttaatttatttttttaattcggtttatttttttgttttttataagggatatttttagttaatttaatatttatagaaataatattaatgatcggtttgttgttaataaatatgtgggtaaatatttgtttggggtttttagttttgaagattgtgagattttcgattttttattttatatttttatatttttgtgtgtgtgtttttaagttttttagtattattgggttagggtttttttgatcgagttggtttcggtaggagattttattttgagttttttgatacgtatttttttgtatttttttaaagatttgtgtaataagtatatatatatatatatatatatatatatatatatatatatttttttaaaataaattttagttagttttgttggtttttaagttttttgtatagtaaatttttattgtatgtatttttttatgatatatattatgtgtaggagttatttgtggtgtgggaggttgttatttatttatttttacgttgaaggtttatatatcgttttattataattttatcggttttttattgatgtatatgtggtcgattttagtttttgttataaatattagtgtgtatgttttttgtgtatataggtaagaaagttttaaagtttttagagtggatgattaggaatgggttggttgtatgatatattgtatggattttaattatattagataatgataatatgatttttaaagtaattgtggttatttaaatttttataataaatgtgtaatatttgatgttgatgatgtgttttgaaaatattgagttgaaggaattgtgttaaaagttatcgttttggtggtagaattatagtaagtatttttattttgttaataattttttgttgtttatttgttttttatataaaagatattatgtttttgatatatagatttagaaaatgtttatttatagtttaattatatagggttattttatattttaggaaaattttataataaaaaggaaaaaatggaggaagggagggaaagaaggaggaatggaggaaaaagtgaaagaagaaaagaaggaaggggaaggggaaggaaagggagtaagaaggagggaaggtgataggttgaatggaaatagagaagaaagagagggagggagggttagaaggaaagagaaacggaaggaagaggttaggtgtggtggtttatgtttgtaattttagtattttgggaggttgaggtaggtagattatgaggttaggagatagagatttttttggttaatatggtgaaatttcgtttttattaaaaatataaaaaaattagttgggcgtggtggtaggtgtttgtagttttagttatttgggaagttgaattaggagaatggtatgaatttaggaggtagagtttgtagtgagttgagattgagttattgtattttagtttgggtaagagagtgagattttattttaaaaaaaaaaaaaaaaaaaagggaaggaataaaggagaaaagaaattaaaataaagaaaagaataggtgttgagaaattagaaattttatgtgtggttaatattattaaaataggagaaaataaaagagatgtagttaatttttatagaataatggaaatgtaagagggttttattagttatttattgttgtgtaataaattatttttaaatttagtgattaaataataaatattgaggaatttaaaagtataatataaatattagtaaaatggagttaatgtaggtagaagttgaataaataaaaagattttatatattggaataagtaagagattattagtgggtagatgaaaatgattttatagtttaaatgttttaaaaagtaagttttattatgggattaaagttatagtattttattaggggatatatttgttaggtgatatggtaagggaggtaggttattttgggaaaggtaataagatgtaaaggtgatttttagtgatggatagaaggagataaggtttattggatgtgtcgtagattataggtaatttaaggagagttaagtaaggttatggaggagtttttgagttatagttggttattagaggagtttttggttttttaggaatgttttgttttcgtgttattggtgtgatttgttattggttgggaatagtttattggaagtaggattttagtattaatgttattgaggatgttagagtataggagtagggttttgggagattatttagtattatttaaattttttgttttgacgggtttgggtttttggaaattaagttgttttaggttgaattgttggatgattttgtttatatttataatgaggtaagggaaattagaaggtttttaggtggatttttggtttttatatatattttcgtttttattgtgtgaaagtagttatgtttttttttgaagatgaggatttattatttgggtttggagaggaggagaattttttttttattaggtggtttttgggtataaattattaaaatttttttcgtgataattataatgtgtagtttagtgggttgttttttgtttttttttaagggtattttttttggaaattaggatttcgtattttgtatagtttagtgttggaagataaaacgtgtaaaatattttattgggtgaatttaagggattggacgtggagttaaatttgtttttattttttgatttttggatatatatgttttttttattgagaatatagtattttagagatatttttgatttaaataatgtatcgtgttttaaaagatggtatttattttttagagtgttttttttaggttggtattgagttttgtttgtagaagatttgtttagtattttttgtggttggtagtttttggatggtgtagatggtgataggattagtggaatttatagttatggaaatattgaaatttttttagttaagtgggttttttaggtagataatgggttaggagtatcgtttagtttgtagattaggaatgttaatagtattcggagaggtgttggttgagtttttgagagtaggatatgaaaatatttatggaataggagtttatttttgtgaagatgaatttttggtttttttaggatggaagtagttaaatgtagttaatttgttatttagtggttagttagttatttaaagaaatagtgttttattggggtatattatgggttttaattgttaatgagttggatatttagaggtgtcggtagttggatttgttttggtaggggggagttagtgttgttggttttatacgtagttttatgtttgttattgtggttgttttatttatgaatttattttattaaattagggttgatttatggtgaaggttggttaatttttatttgtttgtttggttgtttagtgttattttagatttgggtattttttttgggtgtaaatatgggatttaagtttaatttaggtggattatttttattttatgatggatgttgttgggtttgtttaatttatgattttgtgggttatataggtattcgaattatatagttgtttggtgtttcgtggttaagtattttatttaattaggataagggatattaaaagttgtttttaataggtggtatatgtttttgttgtgaatgatatgattttattttagaattttaggttttttattgtgatttttttattggtgtttggtttagttttattttgtatttttttttattaatggtattattagtattagggggtttgagagatggtggttgttcgtattatggtttggatttgttgtagggtttttttttgtgtgggttttatttgaagttggtttttttttatgttatttagagtgtgggttaaagtaatatatttagatgtggaaagtggtgttgttagaattggaagaggtttattaggtagtgtgtttttttttttttggtgaggatgtaagatgaaatagtttgtttgttattttggaggggatatatttgtatttttttaaatatttggttattgtttatttataaaattttattttaatgttcgttatttttttttttttgagatggaattttgtttttgttgtttattttggagtgtaatggtacgattttggtttattgtaatttttgttttttgggtttaagtgatttttttgttttagttttttaagtagttgggattattagtatgggttattatgtttggataattttgtatttttagtagagacggggttttttcgtgttggttaggttagtttttaatttttaattttaggtgatttatttattttagttttttaaagtgttgggattataggcgtgagttattgtatttggtcgagtggttattttggaagttttgtaaggtttatttttattttttggagtgttcgtgttttgttaagtattatagtgtattttttatttgttgtttatttagttaggttaataggaagttgttaatgatatgagttgatttaatattttattggatatttagtatgtttagtatagttttaagattatattatagaggttaggggagttataatagttttgagataaatgataaattaatgttttgaggattttatatgaatgtgaattattttatatttattttttaattggagtggaaagaaatgtagttattaaatttatagttgtatgttttgtgtttaagggtttattaatttgttttattagtgatatttagatagtataaaagttgtaattataatttttatttggttagatttggagtaatttagtttattttttaggttttattaggtttttttagggataggttgttggattacgtagagataatagatagttttaatattattttatattttttagttttgtaatggtgatgtgatttttataatatttgaagtattttatataagatttattttgggatatattatgatttttgatttggttaggatgggggtagtgttagaggtttttttttggtttttagtataatgaaagtttttattttatagattagggatttagggtgggggtaattttatttagtagtgtattagtgttaattatgtatttagggtataggaagataattagggttgggtttatggatttagtagttttattgtgggttataatgtgtttaggtttattttttgagttttataagttttattgtgatgagagatatgatagtgttgtgggtatttgagtattaatgttagtttatatttagtgttaataatttttttagttttgtttgttttttttttttagtgtataattttttgagtaaatggttatatggttttttgtcgaaggattgagggaattgttttagtatatatttttacggggttgtagagtatttcgtttagagatatggattttttttttgttattgagatttgaatttgtattttggttgaggtttaggtattgaggatgggattatgattttgtattgagttaaatatttttatttttttgttttttaatttttgtttttttattatagatattaattagttgtttgttttaattttgggatattattttttattatatttttttatattttttgtagtttgagtttttttggtttttttttcgaggttgttatagtaatcgtgttttttggtttttgtaagttattgttattatttggtttttgtttttttagggttatattttttttagtgatattagaaatgaaattttgggattatttttattattattatttttagtttataaaggataatattttgatattttttagtgatgtaggttttttttattattaagtttttgaggttttggtggaaggtgtgttttttgggtttttttgtagagtatggttttggtaggtttttattaagtttattttttttagtttgttattttattttttatatgttttagggtaattaagatatgtttattttgttgagagttgggtatgtttttttttagattatgtggatatattttagtagtgggtttattttatttattaaagttttggagtgtttgataaatttatgttttgagaaagtgtttttaagttaaaggattatatttatttagtttgaaattttggttttttgattaaatatttttaaattttaattttagaagtagtttttgggtttttatggggacgtgttggttagtttttgtaaattttttgagtgggattttcgcggtattataggggtgaggattgtgtagtattttttagtagtgaaagtgggaattattattagagaagggtgagttttttttgtatgtttagaagattttggagggtacgtatcgtataattttgttttagtttgtagaattttaggtttttttattaaagttttgatttttttgtaataggtttgttttggttgagtgttaaatatttttggagtattgtggtttttatagtgatgtagagttaatattttttgttatttgtttttttgttataggagataaagatttgtttatgagatattgtcgagggtgttaaatgtagttagttatagttgttaataatttatagatttttattatttttttatatagtatcgatgtagttgagaagtaattagttaaagttattgtttttgtaggttttttttaattttgtttttattatgtagggtattttattattgtatgtgttatagtattttttaattaaggtaattttttagtttagtattggtgagatttttagttgtttagttgtattttgtgttatggattttttgtgtttgttattaattcgggtggtatttttttggtttgttaggtagtgggaagtttattttaaatttttatttttgtttgtttttatggattattttttatgttatttgtgttagttagggttttttgagaagcggattttaatatagtagtaaatatgtaaggatttattaggggaaatatttgtgagagaaatttatgagatagaaaatgttgggaaagttattggattataaagtaattttgagttttagtgatgtagagagtgtaggaaggttagttggaagtattttagatcgtgtgtaggttaagggaagtttagtaagggtggtagggagttttggagttttagttagtttttagaagaggaatgttttgttttagtttttgttttattttttttaattattggttggaaaaagttaggggtgggtatagttttagagtaaatgtggtaatagattttagattttaagagttggagttattattaattttgttttttttagatgaggggttgggatgtgtatttttatgattgttataatgatttagtggggagagaggaaaaaggttgacgataaagataaaaatggtattaattgatgaattgatatttttaagtagatgataagggatggtaattggggtattagaagagggtttggttttggttgggagtagaagggttaatttataatagttttttatatggtaaaacgtttgatatgtggtgtagttgtaaatgtatgagtagatagtggtggaatttgtgaagttgttttttaatgtgtttagtttttttagtgaagtgggaagtaaggttattagttgaagtaagaatggggaaggtaggttggatgtgtgagtataaagaaaaagtgtgtaagagttatttaggttaggaggaggttgagggtgagttatgtagggagagggtgattgttggttatggtagggattttttatgtggtttggaattttaaattttaagagattagttagcgtattgtgtgttgttttttagttttttgtagtttatgggggtaggtttagtataggtagaggtggaatttattagttgtgtagttttgttaggtgagtgtgataatttaagggagagggaagggagggatggaaattatttattatagaatttaaaatgggtgaggagggaggataggatatttagggtgagggatagtgagtagatggtaggattattggattgggaattttaggagggtggaacgattgttggaattgatgtattatagggtagattttaagcgtggaaagtaagtatatatgtaatgagtggtttattgatattatattatagtatatgataaaatgatagtatttgtgtttttagagtttgtggttattttgtaaggggatgagtggaaagatggttagagagtgggaagtgtgagatagagagtatggaagggttggggtttttagttatgatgaggtttaggggataataagggtatgagatttaggtagataggagaagattatggaggagaggagttttaggatttgagaggttaggaagcgagggtattttttttgttgtgtgggtgtttattgttgttataaaaattattataaattaaatggttttaaatagtatttatgtattatggtatagtcgtgtggattgtaagtttatttagttttatggggttaagattaatatacgggaaggtttgtatttttttttatagattttggggaagaatttatttttaagtttatttaggtttttgtttgaatttatttttttgtagatagaaaagaggtttttatttttttgttaagagttatttttagtttttagagtttttttttagatatttatatacggtgtttaaggtatatttaatttttttgtttggaatttttgattttttttttttagttttttttttgttttttttttttgtagaatttgattttaattagggtaggttttttgtttttaatggtttttgtgatttgattgggtttatatagagagtttagtagaatttttttattttaaggtttttaatttttattatatgagtaatattttttttgttacgtaatgtaatttgtttataggttttaacgattaagattggatatttttggggattattatttagtttattatatttgcgtatgttgaagttattaagagttaaggagatagtaatgttggagagggtgatagtgaattaggagttataagatttaggattgagaagaatagtttggggtttatagggaatggttatagtgaggtaaatggggttttaatttgatgatagtttaggggttttagggaggagggaggtagaaagttttgagaattataatgaggagtaaggattttattttatttttgaatttaggggtataagtttttggggaaatttttttatgtgggaggatttcggagggggttatgtttttagggaaatttaggttgttgttggagttgcgagatgtaggaatattttgagagaggttgaggaggttttgttgatgtggattgagaaatttagggggtgtattgggaagatttttgtggttggggaggtcggggagatagaatagaggtgtgtagagttttgtggggatgtaagtgtagagtatgtgggggatttagtgtgattgatataaatagggatagagtatgatgagtttagtttaggtgtattttaggtcgacgatggtgttgagtttgtgggagatgcgggaggaggagtaggggtggtttttatttgggttttgtttatggaggtgaggatagtgaggtggttgggttttagtgttgtggggaattttttttgattttttgatgattggatggagtgtttgagggaggaagggttttataggattgatttatgattttgagggatgtgtttattttaggttttaggtttgttttgatatttttatttgtggtttagagttttttattgtaaattattgggagttagtttattttggagtttataatttaaagtagaaatttagatggttgaaatgttatttttatgaaggtttgttattagtgtattatttagattgttttgtaaaagttttattttttttttaaagggttgttaattttgttttaaatttataaaggttgttaatttatttttattgttaattggttgtgggttgtttaaatttatattgtgtagttttatatatttgtaatagtagtagtttgggttttttatattttaataattaagatttttagttgagtatatattgtaatttaagtacgagttatgtataattttagtattaagagataagaggggaatttttttttttgaaaattttgtaaaattttgggttttttttttattgagtgggtataagtcggttaattatgaatatgaggtatttgtttttatttaaaggtgttttagaagtattgatttttaggaaggtttttttgtttgggttaggtattttatattatggtagaggttatttttttttttagtgtatagtgatattttagatagtttattggttagttgttgtttatttttgggtagttttgttttttaaaatatgggtttttatttgagaatttttttgtttttagatgattaaaattggggttatttattttattttgagttatttttgtttaggggtttatggttattttttttagttataatagaatatttttttagaatagtttgtaggaaggtatcgtttttttataggtttatatatgtacggtgtgtgtatagagtttttgttttagtttaggaggtgtgtagggagttttattagtttaatagagtttggtattagtgttatatgttaggaattaaggttataagggatataatgtttttagatttattagagaaggtaaatttatatagtttgtaggattagataaggataagaaataagtttaaaagagggaaagggaaattatagacgtattttagagatattgtagatttggttttagattatggtaataaataagttatataaatttttgtttttttagtatatataaaagttatatttatattttattgtagtttattaagtatataatagtattatgtatgaaagaattatgtatatattttaatttaaaattattttattgttaaaaaatgttaacggtcgtttgaggttttagttaattttaatttttttgttgggtagggttttgttttaatgttgatgattgttagttgtttaagagggtggttgttaaaggttgttgtggtaattttttaaaataagataatgaagtttatggtatggattataaagggggaattagtatttaagtaaggttaatatgagtttttaagttaggtggatttgaatatgaattttttaggtttttttattaattagttataaagttttgggtatatttggtttagagttggtttcgacggatatttgtttagtgggtgagtgtttaatgaatttatttgagttaattgttttatttaattagtgatataattttttttttgtagaagaataagtgagaaaagatatagtgttaagaaatttagatataagatttgcggaagtttgcgttagtgttttaaagtaagttttgtttaaagcggtagaaatattttttatattaggaataggagttgtttgggattttgtttggggttaggttgagagtagagtgggagtgggggtttgggtaggattaggtattggagtgaagataggtttggagagagttgatttttggaggttgttgagcggtttagatagttttttgttttatttgttatagtttttttttttttttggtttttaagtattcgggagtgcgagtttgggtttcgggaatcggtattttgagagcgggagagggatttcgttcgttttttgtttttttgacgcgtttttttcgttttttcgcggggatttagtttttcgggtttttttttgtttatcgttcggttttggagtcgtttatttgggagttttttacggtgtagggggagttggggaggggatagagggatagggattacgggagggtggcgtggggcggcgtatttggagatatgatttgaggagtttgtagattttagatcggggtagaagcgtcgtgggaggagttgttgagttttttaggtcgttttttattttttgtttttttagtttagtttattttgattttttttttattagtttagttttttttaaggttagggtttatagagtagtaggagttgggtttcgggacgcgggattcggtttttttgggaattttggattttaggaaggattttggagattttttattttatgaagtttaatttttatttattttgatggcgtttttagattttattggaaattagatacgacgtttttatcggttttggggaaaaaataagagtaaagtatgagaggtggttatgaggttagggaaatttttgtagaatttttaggaaaggaaattttttcgagttgggtttttgttttagtttgttttttttgtttagttatttgttttagagttggagacgtttaggtttaagttagagattttggatattttttttgatggtgatataatttttgttttttttttttttggaagagaagttttagaattattagagtgatttagtttgtttattttttttattattttgtttttttaattattttttttgagttggattttttatttatttttatattttggatagtgtagagatgtgagtatggttttggggtaggattgtttgcgtgtaagtttagttttattacgatttgtaggcgatttttttttttattgtattatttgaaaacggaaaattagtaggtatattttatagttgtatcgtgataattaaatgaatttatattttgaaagtgttaaggatatagattaatatatagtattatgatagtgtatgatattatcgttgttggttttttttttttttttttttagatggagttttgttttcgttgtttatgttggagtgtagtggtattatttcggtttattgtaatttttattttttgagtttaagcgatttttttgttttagtttttagagtagttgagattataggcgttcgttattacgtttagttaattttttgtatttttagtagaaagggagtttttttatgttgggtagtttggttttgaatttttgattttaggtgatttatttttttcggttttttaaagtgttgggattataggtgtgagttattatgttcggtcgttgttgttattttttttattttttttgtttgagtttttttttttttttttaggtttttagggaaattttttgttggaagattatgtttgtaagaggtttttatttgggaaatgttggtttatggggggattttttttttattaaatggaacgattgttggtgaagtgatagttagtgagttagtgatagtacggtttatgtaaaaaagattatatatttaggattatttttattttaataaagatatattttatatattataagtttaatgtgatttgtgaggagattgttttgatttgtttacgaaaaatattattttattttttttgagagagttttgtaatatattttaaatttttgttttttattttatattatttggtttatgagtgaaggtgataagtgtcgtcgtattatgtttttaggtttgtttgttagagttatagttacgtattatatataaagattatttttttgttattatttatttatatatattatatttatgggatatagatagatattattatagtgtttaaatggttattattgatatttatatatttttttttttggtatatgatattaatatatagaattgtatattgttattttggtttttagtaattgttgattaggttatttggattattttttttattgattataattggaaaaatgggaggaaaatatatatttgaaaagtttggttgaatttatagatgggttagtaaagtagtgaagatttgtttggttaggaattaggaagaggtagaaatttagaagagtattttgagttatggggttgtttttttggattagatgtagtgatatttgttttttaggtaagaagttaatttttgggatttagaattaaagtgttttaatatttagaaggttttttggtttttttagagtttagtgtttattggttagggttatgatatttatatttattttttggaggagttaagtttcgggtttggttgtttttgggatattttatgttagaaaaattttaatatgtgtagataaatggtatagaggatattagttatttttcgattgagttttgtttagtggtgtttttttatttttatttagagataatatgtttattttattaaatttatgaggatatggttaatataagtaagagaatatcgggaggtattttggatagagttttatgtagttatagtttttgcgtttttgtgttttttttttttattttaattagagagtatttgttgaggtcgaagaataaaaaattttaaatattggagcggaatttaagattattgatttattgtgattaggaggttggagttatgtggtttaggaataatgaagtttgtgaggttttggttattttaaggtttttttttattaggagttgttttttacggttattagggaggatttaggagttggatatggttttttttttttttttttatttttgatgagaatttggagaggttttagagtatatagattttgattgaaatggggttagagtggagttaggtaaaaaattttaatgatttagaggtatttaagtataaaataaaattttaatttagagtttttattagagtattaggtttagtattttttgtgtttgtattgtgagtattggagtttgatgagaagaaaaatagttatatgtgtagaaaaatatatgtagttagaaagttgggttatggtttaaggtaagagggatttttgttttttttatggtagatagtggggttttttgttattttggttttgatggattaagtgtagaagataaatttttttgtttttagtttagtgattggtaatagaagttggagttaagagaattagtggtagtttttttttttatgttttagtttagtaaatttaagttaggatttggggtttcggtattttttttttattgtgcgttttttttttttggtttaaaagagaattatatgtaatagaaattaagggttataatttttatagaatttagaaaattggattaggggtttagagagttacgtgtttgttattgttttatcgtttacgtgttgtgtgattttaggagaagttttttgttttttgaattatttgtgaattatggataaatatttttatgttagtaatattattgaaatgtagggaggaattagtgatttaattgggaggaaaaaaagtaaagtgatgatatttatttttagataaaattttttaggaaaatgtattttaaaagtaggagaaaaatatataatatttgtaattttttgtaaaagaagtttttttagtttattatttgtttatcgtttttttgtgaaatttgggtaaaattagtttttttattattttaaataaattaatgtagttggcgattttatgttagtttaggtttataatttttgttttgtgtgaaattgaaagggaatgggaatatttttatttttttgtggtggttaggggatatttagaggtttggaaatgattttatattatttatttttaattgttttattttattttttgaaattttaggtaatttatatttttaaaaaaattttatgtttatatataggataaggtagaaaaggtaatatttttgttttaatttgttagggttgttataataaagtattaaaggttgggtgatttaaataataaatatgtgttgttttatagttttagaggttataagtgtaaggttaaggtgttgtagggttgattttttttgaggttttttttttttgtttgtagatggttattttttttgtttttttaatatagggttttaatatgtggattttggtggcgtaggaatataattttttttgtaatagtttggatcgtttttgataatggatattttaaaaaataaaagagagtaatagatagtatatttttttggttgaaattttttttttggttttttaaaattttggttttgtaatagaaaaaataagaaagagaattaaagtttagtttttttcggaaggtgaggttttttttttaagtttgtgtaattttagatattaagatatggtgttgtgtagttatttaaagttttatttattttagtgattttgtttttgtttttttaattgagtagaagagttttttttaggagagtaattttttttgatgttttatgggttttattttttttaaatttatggaatgaaaaagattttaataaaaaggaaaatatttgttaaatttttattatgtttataatttttgtatttttttaaatgttttatattgtgttgtttattttttaaattttttaaaattggtatataatatttgtatatatttataggatatatgtgatattttgatatatgtatagaatgtgtgtattagttaagatatttagggtatttatgattttaagtatttattatttttttttgttgagaatattttaaatttatttttttttgttttgttttgttttttgagatggagttttatattattatttagattggagtgtagtgatacgatttcggtttattgtaagtttcgtttttcgggtttatattatttttttgttttagtttttcgagtagttgggattataggtatttattattacgttcggttaatttttttttttttttttgtatttttagtagagacggggttttattatgttagttaggatggtttcgattttttgatttcgtgatttatttttttcggttttttaaagtgttgggattataggtatgagttattatgtttagttaaatttatttttatagttattttgaaatatatatttttgttaattttagttagtttgttgtgttattaaatattagaatttattttttttatataattggatatttgtatttattaatttgtatttttatatttttttatttttatattttttttagtttttgggaattgtttttttattttttttatttttttaagattaatttttttggttcgtatatattagtgataatatgtggtatttgtttttttttgtttggtttattttatttaacgtaatgatttttggttatatttatgtttttgtaattgataggattttatttttttttatggttgaattgtattttattgtgtatatatatatattattatttatttatttatttattgatgaatttatttattgatttaataatttcgttattgtgaatagtgttttaataaatttgggggtgtaggtagttttttgatatattgatttttttttttttatataaatatttatgagtggagttgttggatttaatagtagttttattttttgttttttgagaaattattatattgatttttataattgttgtatttatttttttaagagtgtataatagtttttatttttttatatgtttattattatttattattttttattttttattagtagttattttaaataggataagatgatattttattatagttttgatttgtatttttttgatatttaataaggttgagtgtttttcgtatatttgttgattatttgtatgtttttttttgagaaatatttatttagatattttgtttattttttaattggattatttgtatttttattgttgagttttttaagttttttgtatattttagatgttagttttttgttggatgaatatatagtaaatattttttttatttaataggttgtttttttattttgttgattgttttatttgttgtgttgaagttatttagtttaatatagttttatttgtttattttatttttgttgtttgtgtttttgaggttttagttataaagtttttgtttagatttatgtttggagtgttttttgtaagtatttttttagtagttttatagttttgggatttatatttaaatttttaatttattttgagttgatttttgtatatggtgagagacggttttagtggtatttttttgtatttggtagtatttttttagttttatttattttttattgttgtttttgttttttttttattgtatatttttagtttttttattaaaaatgagttggttattaatgtatggatttattgtgagtttttttttgtattttattagtttatgtgtttgtttttatgttagtattatgttgatttggttattataattttatattgtattttgaatttagtaagtgtgatgtttttagttttgttttttttgtttatgattgttttggttatttgggatattttacgattttatatgaattttacgattttttttatttttgtgaataatgatattggtattttgatagggattgaattgaatttgtaaattgttttgggtagtatgaatattttaataatatttttttaatttatgtgtatgaaatttatgtgttttatttttaaaattaatatttaataatattaatttttttaatttatgtgttttatttttttttttagagataaggttttattatgttttttaggttagttttgaatttttaggtttaaataatttttttgttttattattttaaagtgttaggattataggtatgtgttattgtgtttggtttttttagttttgtgtattttttaattttttttattagtgttttatagtttttgttttattttttggggtaaattgatttttagttattttattttttttatgatttgtaaatagttttgtttttttgattttttttttagattatatggtgtttgtatatataaatgttttgaaagtttgtatattgattttgtattttgtaattttattgaatttgtttattagtttttattatttatttggtggaatatttagtttttttttttttttttttttttgagatggagtttcgttttgttatttaggttggagtgtagtggtgcgatttcggtttattgtaagttttattttttgggtttacgttattttttcgttttagttttttgagtagttgggattataggcgttcgttattacgattagttaatttttttttttcgtatttttagtagagacggggttttattatgttagttaggatggtttcgattttttgatttcgtgatacgtttgtttcggttttttaaagtgttgggattataggcgtgagttatcgtattcggttaatatttagttttttttaagtaaaagattatgttatttgcgaataaggttaagttggtttttttttttttaatttggatgttttttattttttttttttggttgattgtttttgttaggatttttagtgttgtgtagaataaaagtgatgaaagtgggagttttagtttttttcgagattttggaggagaggttataagtttgtttttatttagtataatgttagttttgtgtttgttatatatggatatattatggtgtattatttttttggtatattgttggattttgttgttaatatttttaattattatttttattagtaatattatgatttttattataagatttttaaatttataaaatgtatatatattaaaataattagatttttattaaatttattaatgaattttgataaatgtagtatattatttttgttattattaatgtatataaagatttttttttttttttttaatttagtttttatgtttttagtagttattgatttgacggttattaggatagtatagttttttttgttttaaaattttatataaatttatttattttatatggttttttttgtatttggttttttgcgtttgttgtaatatttatgtgattaatttatgttggtgtacgtattagtagtttttttatttttattgttgataatattttattgtatgattgaattatgatttttgtaaattggtagttattttttattttttattattataaataaagaaattatgaatatttttatgtagggattattgataaaatttttattttttttgagtatatatttaggagtggaaatggtagttgtagaggattagtttgtttaattttattagatgatatgaaattgatttttaaaatggatgttttatatttttataggtaatggaggagagtatagattgttttatatttttgttagtatttatagttattaattattttaattttagttattttaatggttgtttagtggttttttattgtggttttattttgtatttttttttgaattggttatttatatatttttttttgtaatgttttagatttttttatagattgtggaaggtgttaaataaagatgagttttttttttttagtgttggatttaaagtagaatgtttagagtttttttatatattttaatttagttaattatatattatgtttgtttttagaagttgttatttttttattcgttttttacggtttattattttattttggtttaagtttatatttttttaggaagttagttattgtgaaggttattaatatgtttagtattgttatgtttttatttgtttttatttttttgtagttttttttatatttaacgatttttttttattttgtttaatttttgtggatttattttataaattttattataaggtagttttagttagaagaaaaaatagagaattataagaaatttttgtgaagttgttatttaggtttgttaatttgtgatattttaatattattggttgtatgtagtatatatagaaaataatagaaatatatgtagatagttttgattttttatagttttgatatgtatgtgttttagttaatattgtattgagtaaagtaagaattgttggtgaatgtgtgttttgaatttgttgtatgtttttatatttttattaagttttaaaaagttttttgtttttgtttgtttgtttgtttgtttttaatatggttttattttgttatttggattgaaatgtagtggtataaatataatttattttagtttttatttgttaggtttaagtaattttttttttttaggttttttgagtagttgggattagaggtttacgttattatgtttggttaatttttgtattttttgtagagaaagggatttattatgttttttagatttgtttggaacgtttggggttaagtaatttgtttattttggttttttaagatgttaggattacgggtataggtttttttgtttggttttatttttagattttttataaattgttttttgttgattttgttatgtatttgtttgtttttttcgttaatatggtttatgatatggattaatgtttatataaatagtttatttgtttttattgttagatagtattttatggaaggaatatgttataatttattttttttttattttattgatttttatatagtttttattaaagatattgttgtaatgaatatgttgggatattgttttttggttttaagaatatatgagtttttttaggatatgtatgtaggagtggggttattgtattttttttaaatgatgttatatgatgttaaattgttttttgaaagaaataatttaaatgtttattagtagggagttggttaaaaagtattgtatttaaaaagggtaatttttatttaaaaaaatgtatatttatataatggattgttaagaaaattttgaataaaaaaaagaaagatatagtgtagtttttgatatttttttatgggatggtttttatgatataatggtaagggaaaatagtaaggtatagaaaagtatatatagtttgttaaaatttgtgtgtaaagggagaaagaatatatatatatatatttatatttgtttgtatagttataaaatatttttgaaagaataagtattatttgagtttggagtgagagatggttaggatgatttttcgtatagttaggttgtttgaagggaggggaaaagagtaagtagtaagttttgtgtttttgtaaagatagagatagtgtaggagatattgagagtttggagtgtttgggaaattcgagtttttttgttatttttttatttttgtgtatttggtagggggtggtgattttttatttttgaatttaattgtattgttagttggttttttaggtttgggtagatgggatggtttattttttgttttgtagtaagagggttttgtttaggaggtatttatagtaggggtagtgtaggtttgtggtcgtttttgtttttatttgtggtgttttttgaagagggattgttagttttggtttttcgtgggcgggaacggttgttttgtaggttattggggtattggttaggaaaggggtgagaaagttatgtgttaattttttaaaatttttgttttaaatgttgatgtttaataaagatgttcgtagttttagttgggttttaaaaggatttttattaatattaatgttgtaatgtatattaaatgaaataggaatttaaatgtggagttttttttttaggacggtttatgtgggagacggtggttgtggtagtggtaatttttaagtgtaaagggtgggtagaggtagttttaggttgaggggttttaagaaattttttattttatagggagaagaagattttttatgggttgtgagggtagtggtttgggtggaatttttgttaggaatttttgttaggaataggagagaaaggttttttagtttttttaagtagtagttttggggagaagttgtgtttttagggatgagtggattaggttggagtaagtttggtttaagtgtaggttatgggtttgggggttagggtaggtagggtttttttgagtaagggggtttttagggttaggttagttgtagattttatagtagttatatgtttttatgttgggtttgtcgtgttgatgggatttttaatgggttttttagttaggagttgtttgtttagggttggaagtggaggagtattgagttgtaggtggagggtagaattatagtgtttagggtttgtttttgtgtgtaggtgtttttataggtgaggtgggattggggattgagggagagaaggattgtgcgtgtgatttagtttaggtttggaaggatatggagttagggttagagtttttttttggggagtttttttattgttagagttggttaggtttgagaggaggggagggtattgggttttttttaggttttgttttttggttttggggttttttttttttttgtttggtgggtggtgggtatagggtaggggttgatgttgatggagttatgggaggggattggtaggggttgggaaaagtgttatgggagggagaaaaaagtgtagacgttattttttttcggagaaagggtgaatttgatttgggattgattgaggagggagaagtttttagggagtaaaaagtagtattgtgtatttaggggagtatttattatttttttttttttttttagagtatatgagtttgtaaggtttagattaatatttgatttagataggagaatattagggtagtgtatagtcgggattttagttttcgttgttagttcgtaggtttattggttttattgagggtatttatattttgtagttaggcggtttggattgaacgttttgtttaggttttattagtatttttttttttgttggtttagtttttttatttatgaaatagggaatgtaatagtatttattttttgtggttgggtggatgaaaattgttagtatatatgaggtgtttgtagttgtgttatattatttttgttattttgttatgattttattatattttaatatattaaatgttatgtaattgtattattataggtgagttttatgagtgagtgttttggtgacggtttttttaggggagttaaggattaatttttttggtacgttgaggtttttttgttttgttatatttttttgtattattttattttattttgtttttatattttatattatagatatttagtttttaaatagatatttttggtttgtgttttattttaagtgtttgggaagggatagagttgaggtttaagggagaatgagagttttgtttagatgtattgatatagtataaagaaatttttttttttttttgatatttttttatcggtttttagggaaggatagatttagagtaatatagataggtttgggaagggatgggggtatatttgaagtaaatgtttagggtttgaagttgtgagagtatatttgttttatagagttggagtttttatgtgatgatgtagagttgaagtgttatattttggaggggataaaaagtgttttggggttttttgattatgaagggtaggggttagtttgtttttaggagatgtggattgaattagtgaaaaataaatgtatagtgaatgaggatgaataaagtaagtattagtatttttcgttattagtttagattgattcggaggtggggaggtgggatagtttttgattttgttgtaaggttttttttgattttttggttttggggtatatagatgggtggcgttttttttggttagggcggttttagttttatttaggtaaggtagtggtggtagagagttaggggagtatttatgaaatagattaaggtagggatgggagttttcggtgtagtaggagtgtatgtaggatttgtttggaagtaagagtattagggattttagttaggttttggttttttttttgtttaggtttataggataattagtaaagatgttggagtggggaatttatttatgggttatttatttagagttgtttatagatatatttttttaagtttgtatttagggttgatgttatatatatatttatatatgttgttttatgtttaagtgtttttatattttggttagttttttattattgttaaataaagttgttattaggtataaatttgtatgttaattgaagtttttgtttttattttattcgaagttataattgtatataattgaaagagtaaatatttgcgtaggattttttgagaaaaacgagttttttttgtttttttagggagagtttttttttttttgtttttgtttttttagggagtaattatttttaagttttagttgatttttttgattttatttttatatatttaagtattaaagtattatttttttgttaatattgtttgattttttagttgtagttattgattattgtattgtacgatggtggaattaatagttaagattatttgttttttttttttttgtattttttttttattttttaatttatttaaataaataaaaatattttatttttttaaaattttttaggatttatatataggtattgtagtagcgataggaggagggggcgttgggaataggaaggatattatcgtttggttttcggtatcggagggataatttggagggtttcgggagtatcgtaaaggtttaagcggagttaatttttataagtttagggaagggtaacgtgataggtcggcgggatagttttatcgtcgcgaagaggggttgtttaaaaggtaatagttataggagatgagtaggggtgtttgttgcgtcggagaatttatttttttaattttatcgacgttataaggtagagggcgaggatagcgaggtcggtcggatttcgtatttttgtttttaattatcgtttatgggcggggaggagagattatcggtcgtaagtagaacgtagaacgagaagagcggttttgttagttatgaatgtgttttttatttgtatcgttttcggtttcgttcgggagaacgcgacgttattatatttattatttgtttttttttatttttttcgtttttttttttttttagtatatttatatagtaattatgtttaatttagttattttttgttttttttttcgtgatttatttttttatatgttaatttgattattttttatttgtttcgtagtatttgtttttttttaagttaatatttgtttttgtttttgtttatgttttagataatttttattaatttaattttgatatttgttttatttttgtgattttgttaagaaattagagattttgaattttttattaattttatttttttggaaatgttttttttgggtttttttggttgtttttatttggattggaggtttttatttgtgggatagagttatttttttaggatttttttttattattatttggggcggtgttttatatgtagtggagttatttggggttttgataaatgtagattgattaatttgttaaggttgggtttgtgagtttttttgtttagttttatgagatgttggttttgttggtttatggataatagttggggtagtaaggatttttttttttgttttatagttttttgtattttttttttatagtaagtatatgttaatatatttttaataaatttatgtgttttttttttaagttggtattagagttaattattttttttattgcgttaaaatttatattatataaaatttggtatcgtaataatttttaagtatagagtattataatatgaattgtagtatattgttatgtaatagatttttagaattttttattttgtaaaattgaaattttacgttgaaaatttttttaagaatttttttagtttaattattggtagtcgttattttatttttaggttttaagagtttagacgtcgtatataacgaattgcgtagtattggaatttttttgtgattggtttattatatttagtattgttttttaggtttatttatgttgtagtatgtaatagaatttttttttttttaaggttgaattatattttattgtttatatagattatatgttttttatttatttatgtgttgatgggtgttttgtttgtttttttgttttggttatggtgagtaatgttgttgtgaatacgggtatgtaatgttttttttttttatagttttttttattttagtggaattaatgttttagtagttatttttgatagtatatatttaaagtatttttgtatgtattaatgtgtttattgttgttttgatttttttttggaagaggatggaaatgtatgaaggtgttgtttggtatagtatttaatggtgaagaagagacggtgtaattgattagtgttgggttttagtattttgtaattttagaattattgtgaatgtaaaaataattaaaaaaattagtgttgtttagaaagggggagttatttttaaatatggcggttttgggatagttggtttttttgttaggttttttttatgggggtttttttttgtagtgattgggatttttttttattttattttattttgtgttttgatttaagagataaggtatgtttgtagttgtgtttatatttggagtgtgttagtatattataaatattggtttagtggtgttagtatattataaatattggtttattatgggttattttattatttattgtgtattttgattttattttattggtaatataataaataatgatatgatgattttagtaattatatttttttttttgtgttaaaaagtattttttaggaacgtgagaaggagatagttttcgttatagttgattaagggagagttcgttaggttgggtaggaggatttttatcgggaatttgtgcgatgagttgtgatatttttttttttatttttaattttagttttagtaggtattttttgggcgtagaagtagtgtagcggcgttatttggcggtttgtatttttttttttttagattaagtatagttttgaaatttatttgttttttttttgtgtttgtgatttttttaggggatattagcgtgggttaatttttttgtaaagtagaataagcgtgagattggattatgttataggaggaatggtgttatttttatttgtggagagatttttgttatcgtgtttaggggaaggatcgagttttatttttacgtagagaggaggttttggttgtaattgttttagtggagagatgaggattttttttttttatattgatggttaaagtttgtagattgggttaggtttttttttagttatgttttgttaggtttatttaggatttaagaaataaattgtggatattgtttttagcgacgtggagttgaatgtatatttagtaatgagatagttttgttaggggttttggggttgtcggttgttttgggtgtttagtgtttagagaggaggatggggaggaggttttgtgtagaataggaatcgtggagttggatgtatatttagtaatgagatagttttgttaggggttttggggttgtcggttgttttgggtgtttagtgtttagagaggaggatggggaggaggttttgtgtagaataggaatcgtggagttggatgtatatttagtaatgagatagttttgttaggggttttggggttgtcggttgttttgggtgtttagtgtttagagaggaggatggggaggaggttttgtgtagaataggaatcgtgttttataatttattttattttgcgttcgtttttttgttataaaatataggtgatataaaagaaaaaaaattttaaaatggtgatttttaattaatagtaaatattttttaattattagaaagagagagaagtttgttagttgatttagaagttttattaattgatttagtttaatagtaaatttttatttttttaaataaaaatttattatattttgatttttgtggtttttatttttttgttttattttatatttttattattttaaatgatagtttagttttatttttaaaaataagttttttgggttcggggcgtcgtcgtcgttttacgagttcggtgtttaggagttcggtcgtttgttcgtttgtcgtttgtcgcgttcgttcggtttcgttcgttcggttcgatcgtcgcgtcgcgcgtatggggcgcgttttcgggggggcggtcgagggtcgttgagcgtcgggttcgttttcgtcgatgcgtttagtcgttcgcgtcgggggttttaggtcgcgtcgggttcggggttgagtcgtttttcgcgttcggtatgttcggttcggttcgtcgttcgtcgtcgtttagggttcgagttcgcgcggcgtatatttagttcggcggcgtcgcgtagtcgagggagttcgtttgttgcgagttaggcgcggggcgttaaggttatcggttcgacggggcgtacgcgcggttatggaggttaaggttcgttcgagtcggcgttcgcgcgcgtagcgggatcgtggtcggcgtcgggaggtcgttcgcgacgttcgcgtttagagttcgtcgtcgggcgacgagttcgagtttagtttcggtaaggagaacgcgggttttcgcggcgcgttttttcgaggcgtcgttttcgcgtttcgtatcgcgcgtttttcgcgtcgtcgtcgtcgcgagtttagttcgtaggaggaggaggttatcgacggtttcgttatcgttagttttagtattttggaggttttggagaaggatatggttttgaagttatatgagcggaaggagaagtgggagcgtcgttttattaagaagtttcgggagtcggaaatttgtttttttgcggagtttagtgagaataggcggtttttggaggtaggtagtttcgggtaggatttcgaattcgtttgcgatggggcgagaaaggttttattgtagttttttaagtaggtgtgttttttagaaggggggtcgtttttagttagttattgggattagaacggttcggtttagcgttataatagttttagtttagttagtttagttagttttaggggttttttttagtttcgtcggtattttcggattttgggtagttttgttagtttttttagcggttatttttgggttagcgtagttggttttagcggttatttttgggtttgaaatagttttgttagtttcggcggttatttttgggtttcggttagttttgtcggttttagcggttttttttatttttagattagttttgttagttttagcggttacgttcggtttagttttgtcggtcgtattgggtatttttaggttttaggtagtgttgtaggcgtttgcggtttttgttgatttcgtgttattattgtcggcgtttgcggttttttttggttttacggttttttttggttttttgtttttattgtcggcgtttgcggttttttttggttttaaggtatcgttgtaggcgtttgcggtttttgttgattttgtggtatcgttgtcgatttttgcggtcgtgggttagttcgtgttattgtggttagttcggtagggtatttttaggatagcgtagtcggtttttgtggtcgttgttagtttagtgttagcggtattagttttcgcggttattttttatttttcgattacgtcgacggttcgttagtttttttttaggatagtgttgttgttttcggcgggtttttttagtttcgtgttagtacggttagtttcgaaggtttttgttgggttagtttagtcgttttcggcggtcgttgttgcgttttaggtagttttagcggttagtggaagttttagagtagttcggtttatttacgtttttatttttgggttcgggacggtcgaggtagtagaagtagtcgtttatgggttcggagtagttttgtttatttaagcggtcgtttatgggtttagagtagttttgttagtttttgcggtcgtttatgggttttaataagttttgtaaattttagtcgttgttttttattttcgatcgttttttatttttggggtagtcgggtttattttgtcggttttttttggggtttttgtgttagtcgcggcggtttttattggatttggtgtcggttcgttagtttcggttttcgtttttggttttgggttatttttgtcggtttttgcggtttcggtggattcgattttgtgttttcgggatggttcgttaggttttatttgtgagttttggagtttgatgtttgtaggtatttttttatatgggttttttagtttattttagtgtgatttgtattttggtagggttttaagggttaaggtcgtattgtttttcgggttggagatgttttgtcggattagtttgaggttttgtttagatagggttgagttgtttgtcgttggaaattgaggttcggttagaggcgggagtttttatagtgttacgattaggttgaggtttattatattaggaagagagatgaattcgcgtttgtttgtcgtttcgttatgttttttttttttttattggcgttatagtgtttttattcgcgttgttgtttgtggtgtgcgtgttttgggaggggaatatagtttttgagggcggggattttgttgggggttttttagcgtttttttgtgtttttgaattgttaatattgtttttgtatttttgagtttacgtgtacgtttgtttttggcgtgttatttgtgcggagcgcgtgagtttggtgtgtgcgtgttgtgtgtgtatgtgtgcgagagggtgtgagagtgagtggcgtgttgggtatgaaggatttgtggggtgttgtagtttttgtagagtggtttagtggcgaatggtgaaggtgtgggttttagtttaggttttttttttggtagttaggaggtgttggtgtttatttttagggtttttaagttatagggggtatatgggtttatttggtgggttaggatttgtaggggattcggaggtttttatttttattttttaggattttgtttttattattttcgtgggtatgtattgaagggttgtttgtagggtttttaggcgagggggattttatagggtgggtagcgttttttttcggtttttttatagttttttgtagcgtttcgtttggttgttgatttatatgtggtcgggtatattttatattataaggttatttttgggtttatttttgttttttttacggtttttatttgtggttaggtgttgttatttttttaggatttggttttaaggtagttttattcgagttttttggagtttaaggtacgttattcgtttaaaagggagggggtgtttgggggggttttgattgtttttagattttaggggagttgggtaggttttaattagtggttttttagagagtagcgttgattatttggatttttgcgttacgtgataggaggttttggttttgtaggtttggttttgtttagttgggttgttttaggtgttaggaaggggatgggtgtttttggtttttaggttaggtagttgttgatttttagtatttcgtatttgtttatgaggattttattttcgtaggttttttcgggttttgattagtttttggtgtagtatttgttttggttttcgggttttttcgttttttatttattcgggttttttttttcggtgtttatttggggtttttattttagaagcgtagggtttatttttttgattaaagaaaataaaaagtgtcgtgttattaaaaaaaaaaaaaaaaaaaaaaaaaaaaaaaaaaaaaaaataaaaataagttttttgtttttatttgttttataggttatttttttgaaattaatattgtttggtagagttttttgttgtttgtattttgtggattgtattttaaattatggtttaatatgtatttttattatttgtattttttagaaatttgtagtttggtatagaggtttgtatttatttagattttttttttcgtgagttttggtggtattatattatgttttttaataaggggaagagtttaatattggttatttttttttggtgatgaaaattgttattgttgtttagtggttagatttgtttatttattacggatggtaaagagttgtagttttagttttttatttttttttatgtattatttgaataatttgtaaaataagagatttatttttttttattatttatttattataggaaaattatttttaattaattagatgtgaaaattttaagaaaaatattagtagattgtattaattaatgtgttataaatagattgttttgattaaggtatatagtttaagaatgtaaggatatttaaattttaaattttttaatgtattttgttatttaattaaagaataaaaaatagagatgatgttattttattagattaagaaattattttagatgaaatttagtattttatttgatttatatttttttagttatttttaggttaaagaaattatgtaattagattggggttatttaaataatataaaataatttttatatttaaaggtttatgtttttaattatattagtaaagttttttttgttgtgtaaagtaatatatttaaatggtttgcgttttagggtttggatatatgtgtgaggttattattttggattttatagtgtatatggtggttgaatgaggtttaatttaatttttttttaattaaatttttagaagaagagaagtgagtaaatggaaagaggtattttagaaagaggttattttaaaatattaaggaaatgtattattgtaaataaagttttgatgttataaagaaatagtatttaaatataaaattttttttttttttttttagtaaggtaattatttttatataagggtgtgtttttatagatggagtaatggtgagtatatttttggataaggaaggggaaggggtttttatttttgatgtacgtggtttttgttgttgtgttatttttttattggttagggttagatcgtataggttaaattaatttagattggttaatttaaagagagtgaaataggtgattagaatgagttagggtggtgtaggtaattggaatgagttaggttgggataagtaattaggatgagttagggtggagtaggtaattagaatgagttagggtggagtaggtgattggaatgagttagggtggagtaggtaattagaatgagttaggttggagtaagtaattaggatgagttagggtggaataggtgattaaaaaaggttgttttatgaggaagttaagtttaaaagtagagggtaaagaattgaatatattgatatgttaattattttaagagaaatttagaatttatatttaatagtattatagtattgtgaataaaaagagatttatatttatttatattgtattggaatagaagatgttaaagagaaatagatattttaaaatttgttataggagaaatatagattttttaagaagtaattggttaaaatgtaattgattattttttgttagttatagtagttagaagtaatataattattaaagatttgagagaaaattaatgttaaattagaaatttgtagttgataaatttttttttgatgaataaaggtaaaataaaatattattatataaatgaaattgttgtattgtttttataatatttaattttaaaatatttataagaatagagaaatatgtaagaataaaagagagaaagaaagtataaattttaatttgtaatttttggtatatgtaatttagtattgttataaaatattaataatgtagtttttaaagaaaaaagttatgtaaaatatataatatgttgtgttataatttttttatttatttttttatttttatttttgatttttatgaagtttaaggaagtttgatttttttatttgaggtttaattttatagagtatagtatttagaataaggtaggtgtttaatgatgtttattatttgaatgagttttttggaagtatttagtagattaggaattttgatgtataagtataatttaaaggtggttgaggagtgatattagagaatatagtggtataggaattttaagggttatttttgtatagagataatgtgtttgtaaaatattattataaaaaaaaattttttggttgggtatggtggtttatgtttgtaattttagtattttgggaggtcgaggtggggggattatttgaggttaggagttcgagattagattgattaatatggagaattttagtttttattaaatatataaaattagttgggtgtggtggttcgcgtttgtagttttagttattcgggaggtgaggaaggagaatcgtttgaattcgggaggtagaggttgtagttagtcgggattatgttattgtattttattttgggtaataagagtaaaattttattaaaaaaaaaaaaaaaaaaattttttcggagagttgttaaagtaagaatttttggatttattattagatattttgattgggttgataaagaattaattgtattggaattttgaaaaattattaaaggtttattgtaatttagtaagtttagaaaaattaattggaatttaggagtagagttttgtggtattatattttatttttggtttatttttttttgtttaagttagtagtgattttgaagatagtagtttggttttttagtgtgggttttaatgttagtgggagtcgagtggattatgtttttaaagtgttgtggttgtttatttttttttgttgggtgatttcgtgaaggatgataagaaatggtttatattgggttgggtatggtgatttatgtttgtaattatagtattttgggaagtttagttgggtgtattttttgagtttaggagtttgagattagtttagataatatggtgaaattttatttttataaaaaatataaaaattaattgggtattatggtatgtgtttgtagttttagttatttaagaggttgaggtgggaggattgtttaagtttaggaggttgaggttatagtgagttaggatcgtgtaattgtattttagtttgggttttagagtaagattttgtttaaaaaaagaaaaaaaagaaagaaaaagaaaataaatggtttgtatttattttttttatttagaatttttttaggttatagaggtagagggtatttgttaaaattatttaagtgttattgaattagtagttgtttttttggggtaaaaatatattatatgagaaaggtaatagatatatagaaaagtttggaggagaaattgggtgagtgagatgggaatatgggttttgaaaagtttttatatttttgggaatttgtatagttttttttatgattagtatgtcgtatagatttataaagtatttgagaatgttttgtgtttatattttttgttaatttttaatatttgtataagtaggaaatgaaggttaaagtagtattgtaaattgtttagtagagtgttgagggtatgttttaaaatatatagagagtttagataaaaagattgaattttttttttttatttttttttggttgaagatgttttaggaaatatttattaaattatgagttgattattaagtttatagaatagagattttagtgatgatatataataaagaatatagtttatataaaaatagtttagaaaatatgatttttaaagttattatatgttagtatttaaaataaaaatgaggtatgtaattaaattagatagtaagatttatttttaagaaaaaagaggaattgatagaaattgtttttgagaaaggttattgaatatatttattggataaataattttgaattgattgtttaaatatgtttatagagttaaaggaaattatgggtaaaaaattaaaggaaattagaagaattattttaatttaaatagagaatattaataaaaagatagaaagtttaaaaagaaattaaatagaaattttggagttgaaaagtgtaataattgaaatgaaaaatttattagagtaattttattattttttattatattttattagagtaaatttattatttatttttttataaaagtaatttttattatgtagaatgaagaatcggtaagtttaaaggtaagataattgaaattatttagtttgaggtgtagaaataaaaaaaaattatgaagaaaaatgaatagaatttaagaaaattgtgagataatattaagtatatgtattttgggaatttttaaagaaaggagagagaaaaagaagaatggttatttggaggaataataattttaaattttttaaatttgatgaaaaatataattttatttatttaataaatttgatatattttaagtagtaagaattttagaagtttatattgagagacgttataattaattagtttatattaatgataaatagattattttgaaagtaataatagagaaggaattttttaggtataatggatttttaataagattaatatataaatttttattagaaattatggggtttaggaggcgttgggatgataaatttaaagttgagaaagtaaaaggattattaattaagaattgtatgtttgtaaaatttttttttagaaatgatggagaaattacgatatttataggttaaaaaaagttgattgagatggttttaattttataagatatatatatatatatatatatatatatatatttgtaattttttttttgttttttttatttgatttaaaagaaaatgtttatcgattaatgaatggagaaataatatatagtttttttttataatagaatattatttggttataaaatgaataaagtattggtatatgttaaaatattgttgaattttgaaaataagataagtgaaggaagttagttataggaggttacgtaatttatgagtttatttttgtgaaatatttataagaggtaagtcgatagagaaagaagtggatttgtggcgatagggtttgttggtaggtggaaatggagggtgattgtttaatgggtgtagagttttttttgaggtgataaaaatattttggaattagagagtgatgatggttatataatattgtgaatatataaattgttattgtattgtgtattttaaatggttacggtggtattttttgtgtttatgtgtattttattataatgaaaaagaggttgaggaaggtattttaaaattttttgtatagtaaatttttgagtttgtttgagaatttgtttatttgttttttttttttaggatattattttttatttagagtaaatttttgtttttttgtaagtagaaagtttttttttagaatattgtttaagattagttaggtttaatttttaaaatgattttttgtttttgatttaaatgtttaaatgtaattttggggttaattttagtgggagtaagagattatttaattaggataatttatttggagagaaaatgttttgtttaagttagtaaagttttttgtttttttaaaaaggattttgtttattagtgagtatagagtttttgtatatttgaggtggagtttttagtagagtaattaaagatatttgtagaaatattatatatattatgtgtagttgattgatttatttttttgttatttttaattgaaggaaggagttgtatttttattttggtttatttattaattgaatgtcgttggatatggaatattataagtgtgaagtttttagggtttttagttgttttttttgttgttgtggagattttattggtgtggtttatatttaggtaggtttgtaggaagttgttttttaatttttaaggttaatatttttagtgaatttatattaaaattttaggtttttagggatttagatttttatttgtggaagaaaagaatttattttatttttttaggtgtgatggtaattatatatattataatataatatatatatatataattataatttatatatttataaaagagataattagtattttataaattgatgatatttttagtgttgattttattgtttaggtgaatattgtaatagaaggatgagttatggattgtagaggaataatattttttttattttttggaggagttattagtaggtatttttgttatatggattttaaatgagaaatttgttttaggttgagattggaaggagatttgaatttttttttattattattattttaaatatgaggttttattatgttttttaggttggagagtagtgattatttataggtgtgattatagttttaaattcgtgagttcgagttatttttttattttagttttttgagtagttgggattataggtgtttattatagtgtttagttattttttattgttattttattttaaatgttttattttgaatgttaaaaatatatgtttttatattagaaatatgaaaatgtatttgattatagaagaatttaaaatgtatatattaatatttggttgaattttaaagaaaaaaaaatgtagagaagaaagaaatattatttaggttttttttttaaagaattattgttattatattattgaaattttttggattgtagtgtgaatggttatttttggagttattttttgtagtgatgttgatttttatttttttgttttttatgtatatatttttatatatgtttttattgtagaaagttgtatttataagttttggggttttttttaagatggagttttattttgttttttaggggttggagtgtagtggtatgatttcggtttattgtaatttttgtatttcggatgtaagtgagttttttgttttagtttttcgagtagttgggattatagatgtgtattattacgtttggttaattttgtgtttttaatatagatggggttatatttgttggttaggttggttttgaatatttgattttaagtgatttatttattttggttttttagagtggttgtgggttattttgaagttgttttttgaatgtattattatgaaagtagttttttatgttataaagtttgtataaaatttatatatttttagaagttgtattttattttaaataaggagaagttattagggtttttttagatttatgtgtttttattttgttttttggtaaagaatattttgataagtatgtttgtatatgaagatttttttatggttgtgattttaaaaatttatagaatatttaggatggatatggtggtttatgtttgtatttttagtattttgggaggtttaggttggtagattgtttgagtttttgagtttgtgattagtttaggtaatatagagaaattttgtttttataaaaaatttaaaagaattagtcgggtttggtggtatatgtttgtagttttagttatttgggtgtttgaggtgggagggttgtttaagtttggaagatttaggttgtagtgagttatgaataatattgtattttagttagtaagtttaattttaaaaaaataaattatagattatttaaattgtaagtattaaattagtgtttgtgagagtttttttggaagggatgtgagtgggtggattggtggggaagatgtttttttattgtgggtagttatagtttaattatttagtggtttagatagaatagaaaggtagatagaagtaaaatttttttttgtttttgtttttttgtttttttttgtttttgtttttttttttggaattggggttgggatatttttttttttttgttttggatattaaaattttaggttcgatgatttttggattttgatttttgtattagtgagtttttttatttttttgttttgtattttgggtttttagggttttgattttggattgagttacgttattggtttttttagttttttagtttttagatagtttattatgggattttttagtttttataattgtgtgagttaattagtttaataaattatttatttatttatttgtttgtttatttatttatttatttatttatttatttatttattattatttaatatttatttattatttattatttatttatttattatttatttattatttatgtatttatgttattggtttttttttttttggtaattttaataaattaatagataataaataaataaaatttgttatagtattattgataattgttattaagaaaaatatgtttgggttagaagattggtggcggtggtgggaatggtaggggatagattttagaagaggttattggataagatatttttgaatatttgattatgggatatttaagtagggattttaatggtgtgaggagtgagttatgtggattattgggtagtatatgtatgtgggagttatagtaggggtaggtggtggagatagggtggagtagataagaaattggtgtgagtggagaagaatgagttaggttgagagtaatgggatgaggttaaagtggttagaggggattttgtgataaggagtgtataggaaatggtgggaaattggggtttttttgtgtttaagaagggaaggagttggagcgtttataggatatgttttaatttttattggaaaggtacgttttttttgttgtgtgggtgatggatagtgggtatgagagttagtaggtagtttagttggaaggttttttcggttttttattttagtgaggatggttttggggtggaggtggtagaggagtgagaagtgattggatttggtgttgatatatatttttaaaattgtggtaaaatatatatattatacgatttattttttaataattttttttagtgtataatttattggtattaagtatatttataattgatggtggttatataaatattaatatgtatttttagaatatttttattattttaatagagattgtatttattaaatgatagttgtttattgtttttgtttttagtttttggtaatttgtattttattttttgtttttgtgaatttgtttattttaggtgttttatataagtgaaatattatatttgttttttttttggtttattttatttagcgtgtttttaaggttttatttaatttaaatattttttatttttaaggttgattaatattttatgtgtatatgtattatattttgtttttttaattattttttgatggatatttgggttgcgtttattttttggttattgggaatagtattgttatgagtatgattgtataattatttgtgtgtatatttgtttttaatttttggggggtatatatttaaaagtggaattgttgttttatatggaaattttatgtttatttttttgagaaagcgttattttgtttttatgatggttgtattgttgtttatttttagtagtagtgtataagtattttattttttttatatttttattaatatttggattagtgaagttgagtatatttttatgtttttattggaattttttatttttatgtttttattgtgtattttttttggagaattgtttatttatgttttttatttatttttgaatgagattgttttgttattgttaagttgtagttttgtatgtagtttggatattaattttttattagatatgtgattggtaaatattttattttattttatgtagttttttttatttttattttttttttttttttttttttttttttttttttttttgagacggagtttttttttgatgttttagttggagtgtaatggtgtaattttagtttattgtaatttttgttttttaggtttaagcgatttttttgttttagtttttcgagtagttgggattataggtgtttattattgcgttcggttaatttttgtatttttagtagagatagggttttgttatgttggttaggttgatttcgaatttttgattttaggtgatttatttattttggttttttaaagtgttgggattataggcgtgagttattgcgtttagtttttttttattttttaatagcgttttttgatgtaaaaaagtttttatattttgatgaagttttatttgttattttttttttattgtttgtatttttggttattagttaagaaattattattaattttaatgattataagatttttttttagtatttttttttaagagttttataggtttaatttttaagattagttttttaaggtattttgatttaatttttgaaaagggtgtaatggaagggtataaattttgtttagtattatttttttgtatgtggatatttaggtttttagtattatttgttgatgtattatttgttgtagtggggttgatatatttgtaagatgtaatgagtacgaatatatgggagtattatgaatttatttatatgtttttattttatagttgttttgaggaggtttttattgagaaatttaatagaaatgaatatatatgattttttataaaatgaaatttaagtaaaattatattttttaaaatgttaagattggagtaagattggaatattattagataaatagaaatataggttgaaatgaagggtttatgtttattttgttataaattttgttggtttataattttttatgtttattgtataagagagttatagagtggggtgatagtttaaataattagtttttggttttttgttttagaaataagtttaaattttttgtttagataaagtaaagaaaataattgaaagatgttgaatgtgaagttggtatttataaagttaaagaagtgagtagtaaatgtaaatattaggaatttaaggagattttatttttttatatagaaatggttttattatgtattgttgaagggagaaggtttttttaggagaattttatgatgaggaaaaatttaatatgatgtaggggttttttgttgtagttttaaattgaattgtttttcgttttaaatataggttttataaagttttatgtttttaatgattttatttgggtcgagattttgttttgtttttggtgttgtttgttttgagttgttgtttggggtttagaaaagtgatttggatattttgttaaagttgtatttttttgatggaattcgaaatttatgaatattttgtttttttgttgtatttttagagcgggttgagtattttgtatttttttttagtatttttttagaagtggtagaagatttggagttagggttttttttaatttttgttttttttttaatttagaggattataaattgttgggggaagagtggtattttgggtttttagttgatcggatgaatattaatatttaatgttttgtaatgaagttatgtgtgtatgtaatattatttttgtacgtagtgttatgggaaagtgggttcgcggattttaggttaaaagtttaagtattaaatgtatagagttagagttttaggaggggcgggatggttggggtggaacgttattttgttttttagttttggggtatttttattttttatatggtgggtgttgggtatttggtaggtattgatgttgatggagtcgagggagggtattggtcggaattgggaaaaatagggttggggagataattaaggtgaatattattttttttgagtgtaagttatggtttgaaatttggagagtttgaaggagatttcgttatttaaattcgtttttttttttttttaagttttatttggttataggtttagtgttaatattagggggcgttatagattatgaaggtatcgcgtagttgggattgtttgtggtgggtttttgggtttttgatttaattagggaagttaagattttgtagttaggtggtttggatttaatttttagttttggttttattgatatttttttttttggtgttttagttttttaatttgtgaaatggtgaggatattatagtatttatttttcgggcgggttttttaatagtagttttattaagaatttgagatagagaattttttgtggtttgttttgtgtattgtgggaggtttgttagtagtattttatttatttttttttattaatttttacgtgataatcgaaaatgttttaggatttttaggttttttttgggtttagagttgtatttagttaagtatttttttatttgatatttgagtttatttttgttttggtttatataaggttattttaaaaagatgttgtttttttaaagattttaattattttttaaataaatttattttttttttttatttttgtatttagttaatttttttaaatttttggtttagtatattttaaaatgtattaattttagttttagtaattaatatatgtgatttgtatgatatttgttatgatttttagtagagttttgatttttttagtatagggaatgtgttttcgattttgttttggatgatgtaaattaatttattttattttatttgtttgggatgttgttttttatttgtaaaatgtaaatgtggatatggtttggattattaagtggttttatttttttatttatttgatatttgttgtgtatttgttgtaagttaaatatatggtatgatattgtttttttgtttatattatagtaaatgagaaaatgagatattatagttaggtgtggcggtataggtttttcgttttagttatttagaaggttgaggtaggagaattgttttagtttaggagtttgaggttatagtaaggtttgatattattattgtattttaatttgggtaatagattttgtttttgaaaaaaaggaaaaagatattgtgagttgtttatatgtattttatgttttaggagatttatgtgttgtaatttttttaaatggtatttttatgtggttttttatgaatgtttgtttggtattttttttttatttttttatttttaatttttttgtattttttattgaaattatggtttttgtaaatagtttacggttatttatttatttatttatttatttttatttttttgtattatttgttttgtaattggagtgtttgagtttattacgtttaatgttattgttgattttattgggtttaagtttgtttatttttatttattgttttttaatattattttttttgtttaattattttttttttgttgttttttttagatgaataaaaaattttgtattattgtggtttttttagtaagtgttttagttataaatttttttgttatttttttaattatttgagaaagtataataatttgtgatttattataattaatagtagattataatttttttgatttttatttatttgtgtagatagtataggggagaattaatgttttggttttgagatataggggtggtggaagtaggatagtgattggatgatgaatttgtagttgtagaggtatttgggttttttatttttatttttcgtagatgttatttttattggatgtttgtaatgtttttttttttgtatgtttttgttagagtttttttatttttattgatagtagttttatttttttgtttatttagtttaatattgtgggtgtttttgattttttttttttatattatagataaatttattagtaagtgttgtgaatttatttagaattttattattttttattattttttttgtttatattttagttaaggtaagcgacgtttttattttggaatattgtattttttttttatcgttttttttattgttttattagttttttattttttaattttgtttttagtatagtagttagagagaagtttttaaaggataagttttattatgttttattttttaaaattgttttttaattttttatgttatttagagtaaaggttaatattttttttatattttttagggtaatttgttttgggtatatttttgattttattttagtttttttttgtttaatatttttggtttttttttttttttaggaatatagataattttttgttttagtgtatttgtattgaaggtttttttgtttgaaaagaattttttgagatattcgtgtagataattttttatattttttaaatttttattttaaggttatatttgtaataaggtttatgttgattatttagtataatagttatttttttgtatttatagtttattttttggattatttgttatatagtatttgttattttttaatttaagtattttttgtttttattttgtttatattatattatttgtttgtagaggtgtttaattttttggtttttttgggttatataggaagaagaattgttttgagttatataaaaaatatattaatgatagttgatgagtagaaaaaaatagaaaaaagaaaaaaaatgtatggataatttttatgatatttgttattatagataagtaaaaaaatcgttatattttaaagttgttttgggttatatgtatttcgagagttgtaggttggataagtttgtatttagaatgtatatacgataaggttagaaatttttttgtttttattttaacgatgttttttaaatgtaaaaatagttaaatatttagtagataataaatgttatttgaatggatgattattgtagtgcgtttttttattttaaaggtaatatttttattaatgtagatttaggttaaatgttattttgtagtcgttgtggaataatattattttatgtggatataaatgtattagtgttttttttattagggttgtttttgtgttttttttttttttttttttttatattaatttttttgtatattgtagtatataattatatttgttttttgaggaaagataatttaaggtttatggttttaattatttaattatatatgaatttaaattagattttgttttataaatttatgagtttggtttggagttagtaataggattattataatttagggtaggaagaagagtaggagagagagtagaagaggagttttaatagaaagtaaattataatgaaaaattttgggattttttttttcgggaagttttagaatttgttttttttaagaaggttggggaagttaggtatggtggtttatatttgtaattttagtattttgggaggtagaggcgggtagattataaggttaggagattaagattattttggttaatatggtgaaatttcgtttttattaaaaatataaaaaattagttgggtatcgtggtatgtgtttgtatttttagttattagggaggttaagataggaggattgtttgaattcgggaggtggaggttgtaatgagtcgagattgtattattgtattttagtttgagtgagattttattttaaaaaaaaaaaaaaaaaaaaaaaaaaaaaaaaagatggaaaatataattgaaagagatttggaaggaggggaagaggtgtaggggtttgaaaattttttttttgataatataggaatttttaagtgtagggattattttaggtgatatttaagtttatgtgattataggttttggtgggataaggttttattgaagggttaaggataatggagtagtaaagatgatttagttgagtagtgattatataaagtttatggtggtttgagtatttattgggcgtagttttatttattttttttttttgtaataaattagtataagaaatacgtgtattgtggaaagtttttatgttttttatttattttgttttttaaattttaggaatttttttttttaattaatttattaattttttttggaaataatttgaaaaattaaatttatatttagattttaattttaatatagaagtaagttatagtttagtgtattataaatttgagatagagacggagatattttagttttttttttggaataggaaaggtgattggggaaggaatgtagtttagtatgaggaagagggttatggtgggtataggggtgggttggtttttgtagaaagagaagttagggtttttgaagttataaagggaaggtatgaataaattttgttatttagttttatatagggtagttgttttatattatagaaaaatatttatgaataaatttatattagttatagtgaggggtgatattttaaatagtttattatatgtttaatatatttaagttaaagaaattttatagtatagttatgtttattgttttttttaataatttatatatattaggtttttcggggtgttatatttataagtcgtgagagatatattagagttttgggtattgttattgtttagagtagaataaaaatagtatttggttagagattataggagatgtggttagaggaggaattgtggggtgggtgagtttttttatgggtttttaaatataagattttaaggattttagggattagttttttttatatttatttgtagtttgagagtagtttttttttttttaatttgtgggaagaaaacgttttgtgagaggttagaaaggtggtagggttatgaggttttagaggaattttttagttttggattttcgagaagtttttagaaatgtgtgattgtagatttagggcgggattaggaaaaataaggaaagtagatgtgggttttcgattaattgtttttttaaggtttgtttttagttagggatttttttttgatttgtgattattaggattaggtttttattattataattattaaggtgataaatttgttttttattgttataggtgttttataaaagagaaggtgttggtatatagggtttaggttgggtaggtttatgagtgtggatggtgttttttagtaattaggtagggcgtatttttatttggggtttgaaatttttagtgggataagaaaatttagattttatttgttattttttttttatttgagtttttttttttttatagtatagtagcgatcgtagttttagtgattatagttgtaaggataattagattagtaacgatatttatgatggggatggtgggtagggaagattgttttgggaaaggaggtgaaggtgagggtttttgatttttaggttttattatcgattttgttaaaggtttttagagaggtttttgttttttttaatagatatgatgtttttatttttttttttattttattttagtatgaggggtttcggtagttttttatgttgtatatggtacgtgtatttttgtttttttttagaaggtattattatagttgtttatttttggaaggttttattttttgtaggtttggtttttacgagttttacgttttgggtttggttttttttatttcgttgttaggttagtatgattttcgtagggtagaagtttagggtttagtattttagggtggttttatagttaaagatagggtggtgggttacgtgtgttttgggggggtttgaaaggaagagttagaaaatttaagtattttgtattttttatgggatattttagtagtatttggatgtgattattttaagaatgaattagatatttggggtggggaagggagtatagaatttagatattagtttggatacgggtatttgggataattttttattttttggaaagttttagtttttgagcgggggagtagggatttttggttttgatttgagtggaggttaagggatttagaggagttggagttagatttttatatatattgagtgtgaggtagagaataaggtttgaggggaaaagttttggtgttaaggttgttgtggggttaaagggaatttttgattagttttttagggattgtttttttttttatttttttagagattttattttttaattgttttagagagtaggacgggtttttagaattattttttggtataggatttggaaatttaggaggattttttttttttaggattagagggagggcgatattttggtgttggttttattttttttttttttttgtgttaggttaggttgggaggtttataggagattagggaggcgttttattgtttttggtattcgcgcgttgtagtatttttttttcgttttttaggtatttgtggagttattttacgtacgtgttttttaggtaggtttttttttgtttagttatattggtcgttttatatttgcgtttggagatttgagtcgtagtgttcgttgcggtttaggagcgtaggttttcgtttagggcgaggtaatttttgttatcgtaggtatattgtttatattcgcggaggaggcgttcgtcggattttaggtcgtagttaattatttattggagggtatgagaatttggttttattttttcggttagtttcgtttatcgagtttcgttttcgttcggatttattcgtagggattttggtaaaggcgtttggggtttttttaggtagagggtttgggcgggtttcgcggtttcggggtggattttagattcggagattcgggagtattcggggcgttcgtggggtatggaggtggggggtcgtgatttgcgttttgggtcggggttatttattggtttcgttttggttgtagtagtcgcgtagggtttgtaggtttattttgttagtttgtgcgtgggttttggtgtttcgtgttttttttttttaatattttggttttttttgttttatttacggcgttcgcggttttattttcggatacgtcgagtcgttgtcgaatcgtacgaattgcgtgtcgtttacgtagtttatggcgatgaagcggggtttttcgcggtcgggtcgggatacggcggcgttgaaatattttatggagtgggagtttgggggcgaggagaggttgagattcgttcgatttttttttcggcgcggttgtcgggttttgcgttttcgtcgggtcggtttttttttttttcgcgtaggggtcgttttttttttgatttcgtatttattcgtttaggtttcggttagggttagggttttcgagagtagtaggaagagggttcggggtgttatgattattatttttggcgtttggggagaatgagttcgggtgggtgagcgaggattttagaattaggatcgcggcgacgttgattggtttttttaaaaatttgttatttaatgggagtgagaattggggtcgttcggtgagtatttaggaagaaggattcgatataggttaggagaaggaggagagaatttttaacgcggggtttttttaatttatatatcgtttgtggggtttgagattttgagagttacgtttgaggttttgggatttcgttttgatttcgttatttttgtgttaagcgttttgttttagtgtttttttgagttttggtttaggagttgtttgagaaattagggagaaattttcggtaaggtttttgtttttttttttttattttttatttcggaatttttgtttttgaattggattttttgttttttattttttgtttgtttttttgtatttttttagaagaaaaattattttacggagtttggtgttagagagtgagttcgttttgggattgtaggtgtaaagatagggtttttttttttttttaaatttggaaaagttgtgtttgagtgtatgagatagaatagagattagtttgttttttgtttattaattatagtgggtagtataattttggtaatttttgaatgattaggaatttaataggtaaaaaatgtgattttggttcgttggtatataaatgtatttaaaagttttataataggatttataaagtttttaagttttatttttttagataatgtatttgtgattttcgtttgttttattttaaatttatttttatttcgtagttttaagttttcgtgtgagtttaggatatttttttaagataaagtattatattatgttattatatgttgtaattaggagttagtataaattttatttattttatagttgtaagtgtttagtgtagttataatgttttttattagtgtttatgtattgtttgtttttaggaagtatttatatgtgagtggagtgtatattttttaggaatatttagtattttttaaatttgattaatataaaaaataattagtttttaggtagatttatataagatattaaaggttaattgtaaagaatatttagcgaggttttgtagatggatgtaataaaatttataaaataatgtgtttaaatttaagagtttcgttgttttggaatttttttttttgttttttttttttattttttgtttttttagttttttttttcgttttttttattttttaggtttttttttttttttaatttttattatttttttatttttgaattgtggttttagtattgttttatgatttgttatatgagtgttttttttatagtggttttgttattatgagttagagtgtgttatttttttatttaaaatattttagtggttttattttatttttgtgaagtttttagaatgttaggtatttgagtatatgagggtatatttggtttattgtagggattaaattatttttttttggttgaatgaatgaattatgagtgtattaaattgtattatagaaaattataaaatgtaaaatattgaaaaagttaaaaaagattttattttatgtaattagtgtgcgtattaatttattagtttattttaggagttttttgagtttgtgtatgaattttataagattgggtaataaattgttataaatattggttttaaatagtatttatttattgtatttattgatttatttttagatatagagtttttttttgttatttaggatgaagtgtagttatatgattatggtttattgtagttttaaatttttgggtttaagggatttttttattttagtttttagagtagttaggattgtaggtaagtgttattatgtttagttaattaaagagaaatgtagagacgagtgttttattatattattttagttggttttaaagttttggttgtaagtgttttttttgtgttagttttttaaatgttaggatataggtgtgtattattacgtttggttaaataatatttatttgttgtttatagttttttaattagaaatttgggtatgatgtggatggaatttttgtttcggtttttttaaatttgtgtttttattttgaatttttttttaggtttatatagaggtggtagaatgtagtttttggtagttgtaagattgaggtttttgttttttattggttgttattgtagagaatagggagggttgtatttaatgtatggtgtttattagcgtttttttttatatagtttttttatttttaaagtttatagtggaggaaattttttatgttgaattttttttatattgtgaatttttatgtttaggaagaatttagtttttttaaggattttttttattaggatagtttaagtaggataaatttagtttaaagttaattaattgaggtttttaattatatttgttaaatttttttatagtagtatttatattagagttggttgaataattgggggaaggtgaatgattaggagttggttgttgggagttatgatagaattagtttaggaagggttggattttttttttgtgtttaatttggatatagttggaaattgaagtttaagtaaagtgattattatgaatagtaataaaatatattttttttagtcgtggaattttttttttttttttaaaattaagttatatgtttaatattttatagttaatttagattaggtgtggtggtttacgtttgtaattttagtattgttgaaggtagaggaaggtagatttgattttagaagtttaagattagtttgggtaatatggtgaaatttttatttttataaaaaaattagaaaattagttaggtatgttaatttatgtttatagttttagttatttaagaggttgagattagaggattttttgagtttaggaggtcgatattgtagtgtatggtgattatgttattgtattttagtttgggtgatagagtaagattttgttttaaaaatagtaatatgatgatgataaatttagagtaaatgtaaattaacgtgtaataatatatttttttttgtgaaaatgtattagttatttattattgtgtaataaattatgtaaaatttagtagtttaaaatagtaaatatttattattttttatagtttttaatggttaggaatttaggagcggtttttttgagtgtttttggtttagggttttttataaggttgtagtttagttgttagtttagggttgtatcgtttgagggttttattggggttgaggatttatatgaaatatggtttagttatatggttgttggaaaagtttagttttttgttgtttggttttaggggattttagtttttagttatatggatttttttgtagggttgtttatggtatagtagttgggtttttaagagtttatgattttagagatagagagagagaaggtggaagttatagtgagttttatattttatatttagagttataaattgttatgttagtattattttattagttagaagttgtattagtttgtttttatattgttataaagaaatatttgagattgggtaatttataaaggtaagaggtttagttgattcgtaattgtgtatggttgaggaggttgttttaggaaatttataattatggtagaaggggaagtaaacgtgttattttttatatggtggtaggagagaaaaatgtagagtgaagtggggaaaatttttttatatggtatatatatattatggatattatgtagttataaaaaggaatgagattaagttttttgtagggatatggatgaagttggaagttattatttttagtaagttaatataggaataggaaattaaatattatatgtttttatttataattgggagttgagtaatgagaatatatggatatagggagaggaatattatatattggagtttattatgggagggtagtgttgaggggagtattaggaaaaataggtttaatcgttgatttttatagtttgggggaattatttttatgattcgattattttttatgaagtttcgtcgttaatatgtggggattagaattcgtatgataatttaaaatgagatttgggtgggaatatagagataggttatattagaagtgtattattaagtttaagttatatttaagagagggaattaagttgtatttttgaaagagagttgtattaaaggatttacgtatatgttaaaagtaaaattaaaattattgttttaggattttgtaaattaaagattttttttatttaattatttttttttaatgttttaagtttattttttaatttaatttaatttaatttaattttaagttttagggtatatgtgtaggatgtgtaggtttgttatataggtaattatgtgttatggtggttggttgtatttattaatttattatttaggtgttaattttggtatttattagttattttttttaatgatttttttattattgtttttttcgaataggttttattgtgtgttttttttttttttggttttatgtatttttattgtttagtttttaattataagtgagaatatgcggtgtttggttttttgtttttgtgtgagtttgttgaggataatggtttttagttttattcgtatttttgtaaaggatttgattttatttttttttatggttgtataatatttcgtggtgtatatgtattatattttttttatttagttttttattggtgggtatttgggttgattttatgtttttgttattgtgaatagtgttgtaatgaatatatatatgtatatatttttataatagaatgatttatatttttttgggtatataatttttaatgggattgttgggttaaatggtatttttggttttaaatttttgaggaattgttatattgttttttataatggttgaattaatttatatttttattaatagtgtaaaagtttttttatttttttgtaattttgttagtatttgttgttttttgatttttaataattgttattttgattggtatgagatggtattttattgtagtattgatttgtatttttttaatgattagtgatgtttagtttttttttttatgtttattggttatatgtatgtttttttttgagaagtgtttgtttaggttttttgtttattttttaatgaagttttttttttggtgtaaatttgtttaagttttttgtagtttttgaatatgagatttttgttaggtggatagattgtaaaaatttttttttattttgggagaaatgtttgtttattttgataatagttttttttattttatagaagtttttttgtttaattagattttatttgttaatttttgtttttgtggtagttgtttttggtatttttattataaaatttttgtttatttttatgttttgattggtattgtttagatttttttttagggtttttatagttttgggatttatatttaagtttttaatttattttaagttaatttttgggtaaggtgtaaggaaggagtttagttttaattttttgtagattgttagttagtttttttagtattatttgttaaatagggaattttttgtttattgtttatttttgttaggtttattgaagattatagggttttagatgtgtggttttatttttgagttttttattttgttttattggtttatgtgtttgtttttgtattagtattttgttgttttagttattgtagttttgtagtatagttttaagttaggtagttttatgtttttagttttgttttttttgtttaggatttttttggttataggagtttttttttggatttatatgaattttaaaatagtttttttttaattttatgataagttttattttttaaattaatgattaaaagtttgagatattatagagttttaggtgttgaggggaaaatagtttgaggtagagaaaggagatataatagtatttttgagttttttttgttaatatttttaataatagtaatgttttttttaatgagttaatatagttgagaatatagaataattagattaaatagttttaagattttagtgttataaaaataatgttttgaaaataagtttttgttttgtttaaaatgttttaaatttaggggaagtatgtttttagtgttagtttttttattgaaatatcgttttttaaaaaatatttgtttatatttaaaaaaagaagtattgttttgtttttggagtagttattttttgtttttttttttaattaatttgtttttatttagaaaaatattgtttaattagattgttttttatttataaagatgtgaattttatattttagttaatatatttagtatgttaataatttcggtttgatgtagtattacgaaattgttagttcgaattgagaaattagttttttcgataattggttattcgatcggtattttataatatatttaatattttttgttgtgatattgaatgatatgtgatagaagtgatttggatattattatgattttaaatagtatgttattaggtgtttttgaagtggttttgtttgtttttttgttttcgtagttttattgtgttttttatttatattgttattttattattggttatttttttttattttttttttgttttatttattttgattaatgatgtgtatttttaattttgtaaaagtttaatttagtggtatgtgtggtagaatgtaatattaaattttttgtaagatggaattattttgtatattagattgaagattgtatatatgaaaatttatagagatgttagtgagttaaggattaaatgatttatttgtagttaaagttatttttatggtttcgtggttttttttgttatatggttttttataattttgtgtggttttgttttaatgtaagtagtttttgttaaggatgtttgtaatgaattttggtattttttttttttttatttttataaaaattaagtatattttattttgaaaaaatttatttaaggaattaggaatttaagttaatttttttaatttaatgtttttagaatatattattaatattaagtattatatatttattttaaaagttttattttaaaagggaatggatgatatgttgtttggattttagttagtattgttgtaaaatatagaatttgtaaattattttgggttgttgtttatttatattttttaaaaggagattttattttgagttttgtgattattatttttttatttagatgtgtggttttatttttgagttttttgttttgttttattggtttatgtgtttgtttttgtattagtattttgttgtttttataatatttataaagaaattatagagtttttttaaggatttgtgtaataagtatagatatatttttaatttaaatattagttagttttgatggtttttaagtttttagtatagtaaatttttattgtatttatttttttatgatgtatattatatataggagttatttgtggtgtgggaggttgttatttattcgtttttattgttgaaggtttatattttatggttatattataattgtattagttttttattgatatatatgtagttgattttagtttttgttataaatattagtgtgtatgttttttgggtatataggtaagaaagttcgtagagtgtatgattaggagtgggatgattggatgatatgttgtatggtttttaattatattagataataataatatgatttttaaagtgattgtgttaatttaaatttatttatttatttatttatttatttatttatttatttttgagacgaagttttgttttgttgtttaggttgaattgtagtggtgttattttggttgattgtaatttttattttttagtttaagtaatttttttgttttagtttttcgagtagttgggattataggtatgtattattacgtttagttaatttttgtatttttagtagagtcggggtattggaggtcgaaagaatgagggtcgtgattaatttagtatattattggaggttatatgagtaaatagtaaattgtttttatgaaagtaggatgttggtaaattgataaattgagtttgttgttagaaggaattattagaagtaagaagttttcgatttttttttttagaatagatttttttgtttttgtttttatttttgtgtttatttttttttattatattttatagtaatcgattgcgataatggggttttattatgttagttagattggttttgaatttttgattttaggtggtttatttattttagtttattaaagtgttgggattataggcgtgaattattacgtttggtttaaatttttgaaataagtgcgtaatatttgatgttgatgatgtgttttgaaaatattgagttgaaggaattgagttgaaagttattgttttggttgtagaattatagtaggtatttttatttagattttgttaataattttttgttgtttatttgttttttatatatcgtggtattgtatttttgatatatagatttagaaaatgtttatttatagtataattatatagggttattttatatgttaggaaatttttataataaaaaggaaaaaatggaggaagggagggaaagaaggaggaagagaagaaggagtgaaagaagaaaagaaggaaggggaaggggaagaaaagggaaggaaagtagagtaaaaaggagggaaggcgagaggttgaatggaaatagagaagaaagagagggagggagggatagaaggaaggagaaagggaaggaataaaaaagaaaagaaattaaaataaagaaaagaatatacgttgagaaattagaaattttacgtatggttagtgttatgaaaatggaaggaaataaagtagatgtacgtaatttgtatagaataatggaaatgtaagagggttttattagttatttattgtcgtataataaattatttttaaatttagtgattaaattaataaatattgacgaatttaaaaatataatataaatattagtaaaatggagttaacgtaagtagaagaagttgaataaataaaaggattttataaattggaataagaggatattggtgtgtagatgaaaatgattttgtagtttaaattttttaaaaagtaagtgttattatgggattaaagttataatattttattaggggatatatttgttagacgatattgtgagggagttaggttattttgggaaaggtaataggtcgagatgtaagtgtgatttttagtgatggatagaaggagagaaggtttattggatgttttttagattataggtaatttaaggagagttgagtaaggttatggaggagattcggagttattattggttattagaggagttttttgttttttaggaatgttttgttttagtgttattggtgtgagttattattgattgggaatagtttatgggaagtagggtttttatattaatgttattgaggatgttagagtataggagtagggttttgggagattatttaggagtgtgatttaaatttgttgtttagatgggtttgggtttttggaaattaaatttttttaagttaaatttttggatgattttgtttatatttataatggggtaaggggatttagaaggtttttaggtggatgtttggtttttatatatatttttgtttttattgtgtgaaagtagttatgtttttttttggggatgagggtttattatttgggtttggagagaaggatatttttttttttacgatgtggtttttgggaatatgttttttaaatttttttggtgattaaaataatgtgtagtttaatgggtttttttttgtttatttttaagggtatttttttttggaaattaggattttttaattcgtatagtttattgttgggagataaaaaaggtaaaatattttagtgggtgaatttaagagattggatatggagttatatttgtttttattttttgatttttggatttatatgtttttttattgagaatatagtattatagagatatttttgatttaaataatatattatgttttgaaagatggtatttttagagtgttttttttaggttggtattgagttgtgtttatagaagatttgtttagtattttttgtggttggtagtttttgggtggtgtagatggtgataggattagtggaatttatagttatggaaatattaaaattttttaggttaaatgggttttttaggtagagaatgggttaggagtatcgtttagtttgtagattaggaatgttaatagtattcggagagtggtgttggttgagtgttagagtaagataggaaaatttatttatggaatatgagtttatttttgtgaagatgaatttttggtttttttaggatggaagtagttaaatgtagttatttgttatttagtggttggtcgtcgaaagaaatagtgttttattagggtatattatgggttttaaatgttgacgagttgatatttaggagtggtagtagttggatttattttggtagggttgggagagttagtgttgttggttttatatatagttttatgtttgttattgtggttgttttatttatgtatttattttattaggtttgggttgatttatggtgaaggttggttaattgttatttgtttgtttggttgtttagtgttatattatatttgggtgttttttgtgggtgttaatatgggatttaagtttaatttaggtggattatttttatttgttgatgaatgttgttgggtttgtgtaatttatgattttgtgggttatatagttatttggaattatattgttgtttggtgttttttggttaagtattttattaaattaggataagtaatattaaatgttgtttttaatagggggtatatgtttttgttgtggatgatatgattttattttagaattttaggttttttattgtgatttttttattggtgtttggtttagttttattttgtatttttttttattattggtattattagttttaaggggtttgagggatgttggttgtttgtattatggtttggatttgttgtagggtttttttttgtgtgggttttatatgaaggtggtttttttttatgttatttagagtgtgggttaaagtaatatatttaaatgtggaatgtggtgttattagaatttaaagaggtttattaggtagtgtgtttttttttttttggtgaggatgtaagatgaaatagtttgttttttattttggaggggatatatttatatttttttaaatatttggtatttgtttatttataaaattttattttagtggttatttttgaagttttgtaaggtttatttttattttttggagtgtgtttgttttgttaaggattttagtgtattttttatttgttgtttatttattttagtaaatatgaaattgttaatgaaatgagttgatttaatattttataggatatttagtatgtttagtgtagttttaagattatatattatagcgggtagaggagttataatagttttgaggtaaatgataaataaatgtgttgtggattttatatgaatgtgaattattttatattttttttttaattggagtggaaaggaatgtatttattaagtttgtagttgtatattgtgggtttaaggatttattaatttgttttattagtgatatttagataatataaaagttgtaattataatttttatttggttatatttagagtaattttatttattttttaggttttattaggtttttttagggatagtttgttggattacgtagagacgatagatagttttaatattattttatattttttagtttttttatggtgatgtgatttttatagtatttttagtgttttttataagatatatgaggttgtttggttgttgtggtgtttattttttattttattttttcgtatttttatgttatttttattgtgttttgaataatagttttaagtttgtttatggtttttgcgaggagttaggatatttagatagaatgggttatatgaattaattggtatgtgtttttttttttaggtagagttttatttattttatataagtatagagatttttatataggtaattagattatgagaaataaacgtatttatttaaatttaaagaatggattttgagatttagagaatagtaaaagtgagagtgttagtgacggttttgtaatattgggtgtttggaatgtaggtatattagggagagttttaataatttattttttagtgtttaatttttttttttagttgtttattagttgagtattaaggatttacgattttttcggatgttatttattggtagtttaagatttttagtatgttttttagggttttttttttttttgttgtattttgttgtagtttataatgtattgtgattgttttaggattttttaaatatttgatttatgtttttaatggttgtatttagttgataagaaagggtataattatttatgttgtaagttagtttaaattatattttttggtgaggtggggaaggggtcgttgagggggttttaatcgataggtgtttggttagtgtatgaaagggaaagtaagaagtaggggggatggtggtttagtatattttttttttttatttttttatgattatgtggtttgtttaaatttatattaaggtatatagaattgaaaatgagttattatatgtaggttattttttatatttttaagttttgtttaagttagggttgggttaaggttttcgaatatttagttgtagtttttttttgttgtaggtgaggagtgggtagtagggagggtcgtggtgtttgttttgtttttatttcggtttttgttttttaggtttattaggttgtatttaggtgggtgagttgggaattgcgtgttgattgttgagggtttggatgatcgttattttagagggagtaaatagtaaaggtagatgtgatttagggagggttagaaattggagaggaatttaaggagaggtggtgtttttagtttttttttttttgtattttttttttttgtttttttagttattaggaggatattaagaaaaagatttacgagatttagaatgagggtttttatgtgtatagtttttttgaggtttttttgtaatagggagagttttgagtgtatatggttattttttgtttattttgtagttttttatatgttttatttgggagttgttttaggggtgttacgttttttgggtttttcgagatcgtgttttttttgggtttttattatatggtttttgtttttttgtgtttttttgtagataatatggattagttgataagtagatgtttttgggttatttggggagtggggattagttttttgttagggtagttgtggtttttgtttttattttatgtttaggtgttattttttttagttttcgagggttatagtatttagtgggttgttttttgggttttgttttgtgttttgtggttttattttgttttttttgagttaatttttttgtttttagtgtagttattgtttggtaagtttaaaataagagatagttagaattatgttttttatagttaggttgtttgaggggagaggaaaagagtaagtagaaagttttgagtttttgtaaagatagaggtagtgtaggggatagtgagagtttgaggtgtttaggaaattcgagtttttttgttatttttttattttcgtgtgtttggttagtgaggtggtggtgatttatttttgaatttaattgtatagttagttggttatttaggtttgggtagatgggacggtttattttttgttttgtagtaagagggtttcgtttaggaggtaattatagcgcgggtagtgtaggtttgtggttgtttttgtttttatttgcggtgttttttatagagggattgttagttttggttttttgtaggtaggaatggttttttcgtaggttattgggatattggttagaaaaagggtatgaaaattatatgttagttttttaaaatttttgttttaagtattggtgtatattaatataattttagttggataattttaataggattttttttaatattgatgttgtaaaggatgttgaatagaataggaagttaaatttggggtttcgttttttagagggtttatgtgggagatagtgtttgtggtagtggtaatttttaggtgtagagggtgcgtagaggtagttttaggatgaggggtttgaagaaattttttattttataggcgaagaagattttttgtgagttgcgatggtagtggtttgggtggaatttttgttaggaatgggataggaagggtttgtagttttattaagtagtagttttggggtggagttgtatttttagggttgagtggataggtaggagtaagtatagtttaaatgtaggttatggggagggtaggttgggtttttttgagtaagggggtttttagtattaggttaggtgtagattttatggtagttatatatttttatgtagggtttgtgagttttagggttttttgataggatttttagttaggagttgtttgtttagagttgggaggggaggaatagtgagttgttggtggagggtagaatttatagtgtgtagggtttgttttggtatgtaggtgtttttgtaggtgaagagggtttggggttttaggaagagaaggattgtgtgtgatttggtttagatttggaaggatatggagatagggttagggtttttttttggggaggttttttattgtgttagggttggttaggtttgagaggaggaggaaagggtattgagtttttttttgggttttgttttttagttttgggtttttttatttattgtataatggatggtggatatagggtaggtgttgatgttgatggagttacgggaggggattggtaggggttggaaaagtgttatgggagggagaaaaaagtggggacgttatttttcgttagagaaagggtaaatttgatttgggagtgattgaggagggagaattttttaggaaataaaaagtagtattttgtatttaggggagtatttattggttttttttttttttttagagcgcgtgagtttgtaaggtttgggttaatatttggttgggataggagattattagggtagtgtatagttgagattttagtttttggtgttagtttttgggttcgttggttttattgagggtaattagattttgtagttaggcggtttggatttaattttttgtttaggttttattagtatgttttttttttgtgttttattttttttatttatgatatggggaaattacgagtatttattttttgtggttggatgaatgaaaagggttagtatatatggggtatttgtagttgtgttatattatttttgttattttgttattttattatattttgatatattatatatgtagtaattgtattattataggtgagttttatgagtgagtgttttgttgatggttttttggttttggtttagtattagtttttttggtattttgaggttttgttatttttgttatgtttttttgtattattttattttattttgtttttatattttatattatagatatttaatttttaaatagatatttttggtttgcgttttattttaagtgtttgggaagggatagtgtgaggtttaggagagaaggagaggtttgtttttatgttttgatatagtataaagaaattttttttttttttttatatttttttattagtttttagtgagggatagatttatagtaatatcgaaagggttgggaagggatggggggatatttgtagttagtgtttaggggttgattttgtggggtaatattttttttgtagagttagagtttatatatgatgatgtagagttgaagggtgatattagggaggggacggagagtgttttgtggttttttgattacgaagagtagaggttagttagtttttggggtgaagtgattgttggggagattggattgaattaatgaagaataagtgagttgggattgaggatgagtaaagtaagtattagtatttttcgttattagtttagattgattggggaggtgggatagtttttgattttgttgtgtggttttttttaattttttggttttggggatatagatgggtggtgttgtttttggttagggtagttttagttttatttagataaagtagtggtggtagagagagttaggggagtatttgtgaaatagattaaggtagggatgggagttttttgtgtagttagagtggatgtaggatttgtttggatgtaagagaaggatgagggattttagttgggttttgttttttgattttttgtgtttatagggtaattagtaagggagttggggtagggaatttatttataagttatttatttagagatgtgtttatagatatattattttatgtttgtatttaggtttgttgttatagatatatttatttatgtgtgttttatgtttaagttattttggaatagtttagttataaaattttaattttttaatttgtgttgtttttttatacggatatatatatataggcggatatatatataggtatatatatatatttatatatatgttatataaatatgtttatttgtatttataaagagatatgttatgttattttattttttattttttaaatttatatatatttatgaggtataagtgtaattttgttatattgttatattggttgtggtaaagttagggtttttagagtatttagtattggagataagtatattgtatttattaagaaatttttttattatatattaattgttaatttttttatttttttgggtttttatggtttattattttatattttttttttatgtatataaagagatattaattaaatacggtagagtggtaatttgaattttattgtatcgtttttttagtttttttgtatatttgaaaatttatatagttataagttggaagaatgagggaaaatagagagtaagatagtgttgaataggaataggttaggggttgtgttttattaggaattataattgatttttgttattttgaaagtgtgttttttgagtagtttttagagagttttggaggtaggtttgtttttatagtaatattaagatgttatttgtttgttttattgtgttgatttttttattagtgttgtaaatgttaaggtcggtagtatatttagtattttagtagaattaggtagtggttttaaattgtagttttatttaagagtgtttttgatggagtagtaaaaaatttatgtggattaaagtttgatttttgagtatacgtttttaatattttttgtgagaaaatgggaaatatgtataagatttttattgtatagagaagtaggatggtagttttgagaaagggtatttgtgtgatttagttatgattttaattagtagattttatttatttacggaaagatagttgtattaatttttgtttgggggtattatgaataaagttgtaagagtatttgtgtataggattttcgtgaatataaagtatttttttgtttgaaataagtgtttaggagggtaattgttagttataaggtaaattgtatgttcggtttgaagaaaattgtaatatttatttttagagtggttgtattattttaaaatatatttttattagtaatataagagtgttttagtttttttgcgtttttgttagtatttgttgttatttttattttgtattttagttatttttattattgtggttttaatttgtatttttttattggataatgatgttgagtatttatttatttgtttattagtttagtatttattttttttagtgaaatgtttgtttatgttttgtttattgtttgttttgtatttggattttatttttattgtttttaaaatttttttatatattttgaatatagtttttatataatatgttgtttgtaaatatttttttttattttgtagtttgtttttttatgttttttataggttttttatagaataatagtttttagtgttgataagatttaatttattaatttttatggattatatttttggtgttatgtttaagaattttttgtttagttttagttttgatgatttttttttaaaaggtttgtaatttaaaaatttaaatttattatttattttagaaaaaaaatttttgtttaggttggttttgaatttttgggtttaagggatttttttattttagttttttgagtagttgagagtataggtttgtgatattatatttggtttaatgtttgttattttaattttgtgttttatatgaaagtttgtgatttattttgagttatttttgtatgaagtatgaagttttggtttaggttatttttttttattgtggttgtttagttgttttattattatttgatgggaaagtttttttttttttattgaattgtttttgtgtttttgtaaaagttagttgagtatgttttgtttatttttagttgagttgtttatttttttatattgagtttaagaattttttatatattttggatatatgttttttattatagatgtaatttgtgataaattgtgaaatatttttttttaatttacggtttgtttttttatttttttaatattgttttttggagtatttaagttttaaattttaattaagtttaatttgttttttattttttttttatttgtagattatgttttttgtattttatgtaagaattttttgtttaattatttaatgttataaaaatttttttttatatttttttttagaaattttatggttttaatttataaattttagttgtttaggtttttaatttgtttgagtttatattttatatggcgataagtgttatattatattatttatgtaattttattgaagattaattgataaaaaaatgtaagaatgtttttttagatttttatttttgtttattaatttttgtgtttttcgtttttatattgtttggattattgtagttttatatgatattttatttttttttaaatttgcgttggtttttttgtattttttgtatttttatatatatttttaggattaaattgttaattttttataaaatgtttgttggggttttgatagagattgtatagaatttatagattttttggtggagaattgttattttaataatattattgagttttttaatcgtatttatttatgaatttagatttttaattttttttagtaatgttttgtagtttttaataaataaattttgttgtttttttaaatttatttttgtttttttttttttgtaattattgtgataggaaagtttagattttaattgtttgtatagagaaatatgttaataatttttaatttgagtttatattttatgggagtttttggatttattttttagtgttagtaggtttttatttgtttgtgaattttatagataaggttatgttatttgtgaatagagttttatgtttttttttttatttggatgtttttaatttttaattatttgttttattgtattagttgtaatttttagtataatgttaaatagaagtgttggattggatatttttgtattgatttttattttaggagaaaagtatttagtttttttttagtaagtatgattttagttgtgggttttttatagatgttttttattagggtgaggaaggttttttttatttttattttgttgaaatttatgaatatgagtggtgttaatatttttgttaattgttttttttgtattttttgagataattatgttttttatttttttattatagtgtattttattaattgatttttaattgttaatttagttatatatttttgggatgaattttattggttatggaatgtaatttttttttacgtggttttttattgtttgttaatgtttgttaaggatgtttttatttatgtttattggtgatattggtttatggtattttttttttgttagttttgttttgattttgatattagggtaatgttagttttgtaaatgagttagaaagttttgttttttttttttttgtttgaaagagtttttgaaatatttgatagaatttattagtgaagatatttgggttttggtatttttttgtgagaaggttttaaaattattgttttagtgtatagttttttttagattttttatttatttttgagttagttttagtaatttttatttttgtataaatttgtttattttatttaagtggtttaattgattggttttaggttttttagagtattaatttataatgatttttaatttttaaagggttattagtgatatttttttttgtgtttataattttggtaatttattttatttttcgtattgtttgttttgatttttggttaagaaaatagatagaggtagttttgtgatagattttgtagtgggaagttttgattatttatagttggtaagttagattaatgttagtaattttaaaggagttgttaatggattttgatagggaagttattgattttggattgggttatgtttaattaggggtagatgttaatgttttaagggttatataagaattagaaaaatggagattatattaatttggattgttgagttatatttttttatataagaaaatatattttatagttttaaaaagttaataatgtatagggaaatgtattatttaggggaaattttgatagaatattgaaatggttgattaggcgcggtggtttatgtttgtaattttagtattttgggtggtcgaggcgggcggattatttgagtttaggagtttgagattattttgattaatatggtgaaatttcgtttttattgaaaatataaaaattagttgcgtgtggtggtgggcgtttgtattattagttatttgggaggttgagatagtagaattgtttgaatttgggaggtagaggttgtatgagtcgagattatattattgtattttagtttgggcgatagagtgagattttattttaaaaaaaaaaaaaaaaagaaatagttagttgaaatattggttgtttaattgtttaaaaattgttaatataattgttgggtaatataaatatgaaggattggtttttatatttttatgaatgtgtttattgttaatatgggtggagttgcgaaattgattttattaggtagtttttttttttttttttgatggattagggtgatgttgttatgattgtatatataattttttttaaggggaggatgttggaataatgattatattttattttttatttttttttttatatagggtgtagtggtattaggaatagggatgtaaatcgaattgttagaaataggaattatttttaaggaaaaaattataattatatttttatatttttatgtaagaatttttaagtaaattaaggattgcgttgtgtttttattttatttggtaaagtcgggattaattgtaagtagagttacgtagattggtggttagatagtttgtattagtttttaatttatgtaatttatcgtttatgattaagagtagattaagagaagatatggtagaatattgttgttgtatgtagtttaggttagtatagtagttaaatttaatgttatttttagaattggaaaagattgatataaagggatagaaggaggaatagtggttgagggtaggtgaataaattaaagggttatgtaatgaggaaaatttaatattagtttatttttttaaaagtggtgtgagtaagagatgttgttttttaggttaattatattggatgtttaaaagggtgaagttgtgtgtttttgagattatttttgtttttggaatttgttaagattgagtggtgtttgtaaagttgagtgatgttattttgggagatatatttatataagaggatgataaattggtttaattttgaatgatcgaatgagatttggataatatgttaatgtttttttattgttataatttttttcgtatgaaaaatatgtggttaaagaaaaggggataatatgagttattataaaaatatttagttttgtttttggttttttttaaaaattttagaattttttgagtgattagagtgtttttagaatattgaggaaaggatttttggttgagtggattttggatattttgagaatgggggttggttgttatagatatatatttatgatgagagggttgttttatttcgttttgtgttgttataaagaaatgtttgagattgattaatttatataaataaggtttatttggtttaggattttgatgtttggaaatgtttgagtatttagcgagggttttaggttgtttttatttatggtagaaggtaaaggggagttggtatgtgtagaagttacgtggtaagagaggaatagagggagtaggaaggtgcgagatttttttaataattagtttttttggaaattaatagggtaataatttattgattttcgagagagggtagtatttttttgtttataaaagattggtttttaagatttaaacgttatttattaggttttaagtttaatattggggattagattttaatatgaggtatttggggataaatatttatattattgtattttgtttttagttagttaaagtttatattttttttatattgtaaaagataataatttttttttaattgtttaaaatgtgttgggttgatttagtattaattttaaattttaaagttttatttgagatttaaggtaagtttttatagttgtgtatttgtaaaattaaaaaaagttatttatttttaaaatattaatataatagtggtagagatattttttatatatttttattttaaaagaaataaatgggttaaaagaaatgaatgtagtgtttttataaggttgaaatttattatggtagatattaaaatttaaagttttaaaataattttttttgattttatattttgaattttgagtatattggttgttgtaagtaatggatttataatgttatttttagttttatattcgtggttttggtgaatataatttatatagttgtttttatgggtgaatattgaatgtttatggtttttttaggttgagtttgtatattgttagtggttttatgatttagtagttttggtaggggttttgtttttgtagttttattaggaattgttttggatattaaattttttttttaaatattagttttagttttaggttatgtttttgtttatatatatgtgtataggttattataagtaggtaggttaaatttggaatgttatgttgtttagaaattttttttattagatatttttatatattatttttaagtttaaagttttatagatttttagggagggggaataatgtttttaagttttttgttaatgtataataaaagtgattttttttttaggttttaataagttttttatttttatgtgagattttattagtttggattttattgtttatattattattagtattttggttataatagtttaataaatttttaggaagttgtaaatttttttttatttttttgttttttgaattttttaaatttttttaatttttgtttgttatttagttttaaagtcgtttttatatttttaataatttttatagtaatatttaattttcggtatcgattttttgaattagtttatttttatatttttataaagaaatatttgagattgggtaatttataaataaaataggtttttttttttttttttttattatttaagatgttaaaaggaaagaaggttaaggagaagaaggtggttttagtttttgttgtcgtgaagaagtaggaggttaagaaagtggtaaattttttgtttgagaaaaggtttaagaattttggtattggataggatatttagtttaaaagatattttatttattttgtgaaatggttttgttatattaggttgtagtagtagagaattattttttataagtggttgaaagtgttttttgagattaattagtttatttaggtattagatagttaaatagttattttgttgtttaagttggtttataatatagattagagataaattaagagaagaagtagaggttgttggtttgggttaagaagaaagttgttggtaaaggggatattttttattaagagtttatttgtttttcgagtaggagttaatattattattattttggtggagaataagaaagtttagttggtggtgattgtatatgatgtagattttattaagttggttgtttttttgtttgttttgtgttataaaatggggttttttattgtattattaaagggaaggtaagattgggatatttagtttataggaagatttgtattattgttatttttatataggttaattcggaagataaaggtgttttggttaagttggtggaagtttttaggattaattataatgatagatatgatgagattcgtcgttattggggagatagtgttttgggttttaagtatgtggtttgtattgttaagtttaaaaaggtaaagggtaaagaatatgttattaaattgggtgaaatgtatgttgttgagttttttgtatgtaaaaataattaaaataatataaatttttttttaaaaaataaaaataaaataaaaatagaaaagaggtttaaattgggttatggttttgtaggttatatagaaagtatgattttggtatttgtttattttatgagagggttttagggaattttcgattatgttggaaggttaaggggaagtagatattatttatatgtttggagtaggagggagagagagtagggaggtgatatagatttttaaatattagattttatgagaattattataagaatagtattaaagagatggttttaaatcgtttatgaaggatttatttttatgagtcgattatttgttattagatattatttttaaaattagggattataattgaatatgagatttgtgtggggatatagatttaaataatattaggggttatggtggatatgaggatgggttggttttttattttttatttgttattgtagatatagatatatttagatgttttggtagaaagagaagttagaggtttttaatgttataaagaggaggtatgaataaattttgtattttagttttttataaggtaattttagaaaaaatatagttataaattaatttaggttagttatagtaagttgtgatattgaatagtttattatattttgaaaaattttaaattaaagaatttttagagtttagttgtgttttttttgtttaattttttttttattttaggttttttaaggtgttatttttataagtcgtgagagatatattagagttttgggtattgtttttgtttggggtggaataaaaataaaatttggttagagtttataggtgatgtgattaaaggaggaattttggggtggttgagtttttttatgggtttttgtttatattattttaaggattttagggattattttttttatttttattatatttatatgaagtttgagtataattgtttttttttttatttgtggaaagaaaataaattgtgagaggttagggaggaggtagggtatgagattttagagaagtttttagaattgtgattatagatttaggttaggattagaaaatttaagggaagaggatgtgttgaggttggattagttgtttttttgaggtttgtttttagtagggatttttttttgatttgtgattgttgggagttaggtttttatgattataattaaggtgataaatttgttttttatttttataggtgttttataaaagagtaagtgttgatagatagggtttttgaatagggtaaatgtgtgtggagatggtgttttataattaggtaagatatgagttaatttttatttggggtttgaaatttattaatggaagaaggaaatttagagtttattttttttttatttgggattttatttttttatattatagtagcgattatagttatagtgaatatagtaacgagaagaattaggttagtaatgatgtttataacggggatgatgggttgggaagatagttttaagaaaggaggtgaacgtgaggggttttgatttttaggttttagttttgattttgtttaaaggttttagaaggatttttgttttgtttgagaagagatatgattttttattcgtttttttattttattttagtgtgaggggtttaggtaattttttatgttgtatatggtatgtgtatttttgtttttttttagaagatattattgtagttgtttatttttggaaggttttgtattttgtaagtttggtttttataaattttgtattttgaatttggttttttttatttcgtttttgggttagtgtgatttttagagggtagaagtttagggtttagtattttagcgtggttttatagttggagatggggtggtgggttatttgtgtttttaggggatttgagggtaagaggtagaaaatttaggtattttgtattttttatgagatatagtatttatgtgattattttgagaatggacgggatatttggggtggggaagggagtatagaatttagatagtattttggatataggtatttgggataattttttattttttggaaagttttagtgtttgaggcggaaatagagatttttggttttgatttgagtggaggtcgagggatttagaagagttggaattagatttttatacgtattgagtatgaggtagagaataaggtttgagaggaaaatttttggtgtttaaggttgttggggggttaaaggggatcgcgtattagtattttagggattgttttttttttttttttcgtagagattttattcgttaattgttttagagtgtagggcgggtttttagttattttttggtataggatttagaaatttaggaggatttttttgttttaggataagagggagagggatattttagcgttggttttatttttttttttttttttggaaggtggtttagggatatttgtaggagattagggaagcgtttcgtggtttttggtatttgcgtattgtagattttttttatttttaaggtttttgttgagttatttcgtttatttttcgggtaggtaggttttgagtagttttgtatgttttttttttaaaatatttgagtcgttttgttcgttgcggtttaagagagtagtttttggtttaggacgaggtaattggcgttatcgtagggtatgtttattttcgcgcgaagaggtttcggttcgggtttaggtcgtagttgtgtatttattggaggtgggagattttgtttttaagttcgcggttagttttagttattgagttttagttattgagttttttttttgtttcgattaatttttcggggatttgggtttgaattgaaaatggaatcgggtataggtatttggggtttttgtgtcgagggtttttacgagtttcgtagtttcggggtgggttttcgattgtgttatagtgggtagtataattttggtagtttttgaatggttacgaatttaatttgtaaaagagatgatttttggttttattatatataaatatgtttaaacgtattgtaattagatttataaagtgaagttttatttttttagattgtgtatttgtgattttggtttgttgtatttttatagtatttttattttatagttttgagtttgtgtgtgcgagtttaggatattttaatataaagtataatgtattatcgtatattgtaattaggagtttgtatagaatttaattattttagaattgtaagtgtttaatgtagttaaagtgtttttcgttagtgtttatgtattttttttattattaatttttttattttttatttatttatagatagggcgttattttgttattttggttaaagtgtagtggtacgtttatgatttattgaagtttttatttttttggtttatgtgattaatgttttttttttagttttttaagtagttggtattataggtttgtgttattatttttggttaatttttttaaaaataatatttgtagagatgaggtttttttaaattgttttggttggttttgaatttttgggtttaagtaattttttcgttttaattttttaaaatgttggtattataggtatgagttataatggtcggtttatgtatttgtttattattatgaattatttatatttaagttatgtgtatattttattgagatatttggtatttttttttaatttttttttttttttttgagacggagtttcgttttgtcgtttaggttggagtggtgtaatttcgtttattgtaagtatcgtttttcgggtttacgtcgtttttttgttttagttttttaagtagttgggattataggcgatcgttattacgttcggttaattttttttgtaattttttattagagacggggttttattatgttggttaggatggtttcgattttttgattttgtgatttacgcgtttcggttttttaaagtgttgggattataggcgtgagttatcgtgttcggttttttttaatttttttattttagagaggtaattaggttttagatagttttatagaatgtattaaagattaaggtgtaagtaatattgtgttaggttttgcggataaatgtattaaaaatttataaaatattgtatttaagtttgagaattttattgttttagaattttttttgtttttttattttattttttgtttttttagtttttttttttgtttttgttattttttaggtttttttttttttttagtttttattattttgttattattgaattgtggttttagttttgtttttggttttagttttgttttttgtttgttgtttatgattgttttttttataaaggttagtaattttgttaatgtgagttagattgttttatttttttatttaaaagtttttaatggttttattttatttttaagaagtttttagaatggaaggtataagtataggggttttgggttgttttgattaaagttgtatttatagaatataaaagtatatttgttatatagtaggtattaagttaatttttgttgaatgaatgaatgaaatataattgtgtttaaaattgtattatataaaaattatgaaatggaaaatgtaaagtaagttaggaaatatttggttttatgtaattattatgtatattagtttatgaatttatttcggtggagaaaatgttatatatttattttttgaatttgtttatttattttttggtagtatataattaattattataaatttagtggttgaaaatagtatttatttatttgtttatattttttttattagaaatttaggtttaacgtgatagattttttgtttagagtttcgtaaagttgtatttttattttaagattggggtttttttttaagtttgtgtagagtttgttggtagaattcggtttttggtaattgtaggattaaggtttttgtttttttcgggttattagagtagatagtggggagggtttttaatttttattggttattagtgttttttttttatgatttttttatttttaaagtttaaagtggaggaagttttttacgttgaattttttttatattgtgagtttttatttttaggaagaatttaattttttttagagtttatttgattaggatcgtttaagtaggataatttttattttaaagttaattgattggggattttaaatatatttgtaaaatttttttatagtagtatttgttttagtgttaattgagtaattggggtaatttgagtaattaagggtggttattggggtgttattatagaattagtttagtatagtttggattttttttttatgtttaaatagaatatataagttgaagattaaaaaatagattattgttaatgataataaaatatattttatatagttatggaaatttttattaaatattaaaagtaaatgatatgtttaatattttataatgaatttagagtaaatgaaaaagtttagtgatttatttttttttgtgaagttgtattagttatttattgttgtataataagttatttataatttagtagtttaaattaataaatatttattattttttatagttatttatggttaggaatttaggagaagtttttttgaatgtttttggtttagggttttttataacgttgtagtttagttgttttttagggttgaattatttgagggtttaaatggggttagggatttataagatataagaattttttatatggtttttggaagaggttttagttttttattgtttggttttaggaggatttattttttagttatatggattataggtttttttatgatataatagttagttttttttagggtttatgattttagagaaagaaagaattaaagtagaaattttagtgagttttatgttttatatttagaattataaattattaagttagtattattttattagttagaagtgagttattaagtttaggttatacgaatagggagggaatgaagttgtatttttggaaaggaggagtattaaagaatttataaatatgttaaaagtaaaattaatattattgttttagggttttgtaaattaaatattttttgtatttgattttttttaatattttaaaatttttttttgtaaagttgattaaatatttgagatagagaaagaagatataataatattttagattttttttgtaaatgtttttaatattaatgttttttttgataagttgtaatagagttgagaaaatatagtagttaaattaaagtgttttaagattttggtgttatataataatgtttttataatcgtaattatgtttgtttttttttagaagtttttaattcggtttaagaatgtttaaaatgttaatttttttatttaagtatttataaaaatatttgtttaattagggtgttttgtagttagaaaaatgtgaattttatatttttgtttatatattagtttagtattatgataataatttgtttggttagggtaagtagaaattgtttattttaatttaggaataagattttttaataattggttatttagtgggtattttatgaaagtttaatattttttattgtgtttttaaattagatgtagtagaagtgatttggattttagtatgattttgaaaaatattgtttttttgtgttgttattattgttgtataagtattttttttatgttttttatttttattgttattttattattagttatttttttatgtttttttatttaatttattttgtttaataatgtttttttttttattgtgtaaaagtttaatttatttgtatgtgtggtaaaatgtgagtaatatattaaatttttaaattttttgtaagatataattgttttgtatattagattgaatattgtatgttagataatgtagagagttgttaattagtttagggttaaatgatttttttttagttaaggttattttttatgagattttggttttttttgttatatgattttttataattggttgtggttttgttttaacgtgtgtagttattgttaaggatttttgagatgaattttggtattttttttttttttttatttttaaataattagttaggaatggtatataaggtgtattttgaaaaatgatattttaaagatttgtgggtcgggaatggtggtttatgtttgtaattttagtattttggaaggtcgaagttggtggattatttgaggttaggagtttgagattaatttggataatatggtgaaatttcgtttttattaaaaatataaaaattatttgggtgtcgtggtggatgtttataattttagttatttaggaggttgaggtaggagaattgtttgaatttgggaggcggaggttgtagtgaattgagattacgttattgtattttagtttgggtaataagagggagattttatttcgaaaataaataaataaataaataaataaagatttatgattaagtaatttaattatttggatatttttttttggtataaaaaataaaatttatgaagttattttcggttgttgtttaattttattttttaaaaggaatttttattttgagttttgtatttattatttttttttattgtttttaaagatttttataataagtatatatatatttaaattatagtttgatttgtttttttaaattttttcgtatagagaatttatataatgtgtatttttttgtgatgttgatgtatgttatgtgtaggagagttatttttgatgtgggagggtgttgtttatttattgttgttgttgaagttttattttttattattatacgataattttgttaatttttattgatgtatatgtgattgtttttagtttttgttataaatattggtgtatatgttttttggatatatagttaagaatgtttttagggggtatgattaggaggtagatggtgggattatatgatgtatggatattaattatattagataaggttaatttgattttttaagtgtttgtattaagaatgggaaagagtttgtgttgtttatgtgttttgaaaatatttagttggagatagaaattaaatgttaaaaggtattgttttggttatagaattattttaggtatttttttatattttattaataatttttttttttttatttttatattataaattacggtattatatttttagtataaagtttaaataatgtttttttttggtttaaatatttggagtttatgaaaaaaaatggagggagggagaaagttttgagggaggaaaggaggaaagaaggaaggaaggatagagaaagataaaatttgaaaatgtttaaaaataggaggaaagagttggaaatagtaagtatagttaatgttattaaaatgtaagggattaaaagatatgtagataatatttatggaaaatggaaatttaagaaagttttaatagttatttagtgttgtgttataaattattttaaaatttagtagtttaatagaataaatatttgttaatttaaagagatattatatatataagtaaaatagattttgtgggggtggtagaagttggataaagagaaggattttataggttggaataagagttattgatatgtagatggaaataatttttagtttaagttttttaaggagtagatgttaagatgagtttaaagtttgcgatattttatgaggggatatattcgtaagggaatatgggaagtgagttagaaatttttggaaaaggcggtagattacgatgtaagtgtgattttaagtgttggatagaaggagagaaagtttgttcgacgtattttagagtataggtaatttaaggagagttgagtaaggtcgtggaggagttttttagttatagttggttattagaggagtttcgtgttttttaggaatggtttgttttaacgtttgttgtgattagttattggttgggaatagtttatgggaagtagggttttgtattaattttgttgaggatgttagagtataggagtatagttttgggatattatttatgagtatcgtttaattttttttttttgagggttttgggtttttgaatatgaaatttttttaggttgggttgttggatgattttgtttatatttataataggataaggggaattataaggtttttaagtggattttttatttttatatatatattttttgttttttttgtgtgatagtagttttgtttttttttttttttatttttttgtgtttggatatatattatttaaatatttttgggggtagttataaggtgtagttttatggatttttatttaaatgtttttttgttagggtgttttttttgggaaattaggatttttttttttatagagtttagatattggagatgagaagtgtaaaattattttgaaggtgaatataagggtttagatatggagttatatttgtttttattttttggtttttggatttacgtatttttttttttgtaaatatagtattatagagatatttttgatttaatatatgtattatattttgaaagatggtagttattttttagagggttttatttaagttggtattaagttgtgtttgtagagatttgtttatgattttgtgtggttggtagtttttgggaggtgtaggtggtgataagattaggggattttatggttattatggtttacgttttatttttttttttttgaggtgtgtttcgcgggtagataatgtattgaaattttgagttagtggtttaggaatgttaatagtgatattggttgagggtttaagagtagagaggaaaattatattatatttaataggtgtttatttttgtgaggatgaattttcgtttttcgggtcgttttttatttgagttgggtgatttgagtcgtcgtgtttgcggttgttaaggagtataggttttcgtttaggacgatggaatttttgttatcgtaagtaagttggtgatattcgcggagtaggcgttcgttcgattttacgtcgtagatagatattttttagatgggtgtgagattttggtttcgttttcgcggttagtttcgtttatcgagtttcgttttcgttaggattaatttgcggggattttggttgaaaatgaaatcgggtaacggtttttgggtttttttcgggtaaagggtttttaggtttcgttgtttcggcgtggatttcggatttagagattcggggagattcgggcggttcgtgggggatgtagaggggtagtgatttgcgttttcggtcggtgttatttataggttttattttggttgtagtagtcgtttagggttcgtaggtttattcggtaaaattgtgttttggttttggcggtttttgttttttttttttaatatttcggttttttcggttttattttgggattcgtggcgtcgttgtcgagtcgtacgtattgcgtgtcgtttacgtcgtttacggagaggaagcggggattcgcgcggtcgggtcgggatatggtggtgtggaaatattttaaggagtggaagtttgggagtaaggagggggttgagattttttcgatttttttttcggtatcgtaatcgggtttttgcgttttcgtcgggtaggtttttagttattttttatagaggtcgtttttttttcgatttcgtatttatttgtttaggtttgggttaggattagggttttcgagagtagtagaagtagggttcggggcgttatgatattattttcggcgattggggagaatcggagtttcggtgggtgcgtgggaattttagaatcgggatcgcggttatattgattggtttttttaggaattcgatatttaatgggagtgagaattggggtagtttggtgagtatttaggaagaaggattcgatataggttgggagagggagaagagaaattttgcggagatggggaatttttagcgttgggtttttttaatttatatatcgtttttggggtttgagattttgagagttatgtttgaggttttgggatttcgttttgatttcgttatttttgtgttaagcgttttgttttaacgttttcgagttttggtttaggagttgtttgagaaattagggagaaattttcgaaatgggtttcgtttttttttttttattttgtattacggaattttcgttttagaattggattttttgttttttattttttatttgttttcgtggatttttttagaagaaaaattattttagggagtttgttgttagagagtgagtttgttttgggaatggaggtgtagagatagggttttttgttgttattgtttgtttgttttttaaatttggaaaagttgtgtttgagtgtatgagatagaatagagattagtttgttttttgtttattaattatagtgggtagtagaattttggtaatttttaatgattaggaatttaattggttaaaaatgtgattttggttttttgatatataaatgtgtttaaaagtattataataggaattataaagtttttaagttttatttttttagataatgtatttgtgattttcgtttgtagtattttaaatttatttttattttatagttttgagtttttgtgtgagtttaggatattttttaatataaggtagttattgtgttattatatgttgtaattaggagttagtatagattttatttattttatagtggtaagtatttaatgtagttataatgttttttattagtgtttatgtattgtttgtttttaggaagtatttatttttaagtgttgtgtatattttatatgaatatttagtattttttaaatttgattaatataaaaaaattagtttttaggtagatttatataaggtattaaaggttaattgtaaagattattttgtaaggttttgtagattgatgtattaaaatatataaaataatgtgtttaaatttgagttttgttgttttcgaattttttttttttgttttatttttttattttttgtatttttagtttttttttttattttttttattttttaggtttttttttttttttagtttttattattttgttattttttatttgtgatattagtattgttttattatttgttacgtgattgttttttgtatagtggttttgtttttgtgagttagagtgtgttatttttttatttaaaatattttattggttttattttggttttgtgaagtttttggaatgttaggtacgtgagtatatgagggtatatttggtttattgtagggattaaattaattttttttgattgaatgaatgaaatatgagtttattaaattgtattatagaaaattataaaatgtaaaatattgaaaaagttaaagattttattttatgtaattagtgtgtatattaatttattaatttattcgtgtattattacgattggtaaaataatatttatttatttgtttatatttttttggttagaaatttgggtaagatgtggatagaatttttgttttgggtttttaaaagttgtgtttttattttgaatttttttttaggtttatatagaggtggtagaatgtagtttttggtagttgtaagattgaggtttttgttttttgttggttgttaatatagagaataggtagggttgtgtttaatttttggtgtttaatagtgtttttttttatatagtttttttatttttaaagtttacggtagaggaaattttttatgttgaattttttttatattgtaaatttttatgtttaggaagaatatagattttttaaggatttatttaattaggatagttaaagtaggataaatttagtttaaagttaattaattgaggtttttagttatatttgttaaatttttttatagtagtatttatattagagttgtttgaataattgggggaaagtgaatgatcgggaggtggttgttgggggttattaaagaattagtttagtaagggttggattttttttttgtgtttaatttggatatagttggaaattgaagtttaagtaaagtgattattgtgaatggtaataaaatgtattttttttagttatggatattttttttattttttaaaattaagttatatgtgtaatgttttataattaatttaggttaggtgtggtggtttacgtttgtgattttagtatcgtggaaggtagaggaaggtagatttgttgattttagatgttgaagattagtttgggtaatatggagaaatttttatttttataaaaaaatttagaaaattagttaggcgtggtgttttatgtttgtagttttagttatttaggacgttgagataagagggttttttgagtttaggaagtcgatattgtagtgtatggtgattatgttattgtattttagtttgggcgatagagcgagattttgttttaataataataatattaataataatgataaatttagagtaaatgtaaattaatgtgtaatattatatttttttttgtgaaaatgtgttagttatttattattgtataataaattatgtaaaatttagtagtttaaaatggtaaatatttattatttttcgtaggttttaatggttaggaatttaggagaggtttttttgagtgttttttgtttagggttttttataaggttgtagtttagttgttagtttaggtttgtattatttgagtgttttattgggattgaggatttatatgaaatatggatgggttatatggttgttggaaaagttttagttttttgttgtttgtttttagaaggttttagtttttagttatatggatttttttttagggttgtttatggtatagtaggtggttttttttagagtttatgattttagagatattgagagagaagggggaggttgtagtgagttttatgttttatatttagagttataaattgttatgttagtattattagttagaagttgtattagttcgtttttatattgttataaagaaatatttgagattgggtaatttataaaggaaagaggtttaattgatttatagttttgtattgttgagaaggttgttttatgaaatttataattatggtagaagtggaagtaaatacgtttttttttatatggtggtaggagagagaattgtagatcgaagtggggaaaaatattttataaaattattagattttatgagaatttttttagtattataagagtagtatgggggtattatattcgtgatttaattattttttaggaggtttttttttcgatatatagggattataatttgtatgataatttaagatgagaatttggtgggaatttagagttagattatattagaaatgtattattaagtttaagttatatttaagagaggaaattaagtagtatttttggaagggaatagtattaaaggatttgaatatatattaaaagtaaatttaaaatttttgttttaggattttgagaattaaaatttttttatttaattatttttcgttaatttttttagtttgttttttaatttaatttaattttaagttttaggttatgtgtgtaggatgcgtaggtttgttatataggtaaatgtgtgttatggtggtttgttgtatttattaaattattatttatgtattaattttggtatgtattagttatttttttttaatattttttttattattgtttttttttagtaggtattagtgtgtgatgtttttttttttgtgtttatgtgtttttattgtttattttttaattataagtgagaatatgtggtgtttggttttttgtttttgtgttagtttgttgaggatggtttttagttttatttatatttttgtaaaggattgaattttatttttttttgtggttgtataatattttatggtgtatatgtattatatttttttaatgtagtatattattgatgggtatttgggttgattttatgtttttgttattgtggatagtgttgtaataagtatatatatgtatgtatttttataatagagtgatttatttttttttggatgtatattttgtaatgggattgttgggttaaatggtatttttggttttaaatttttgaggaattattaaattgttttttataatggtttaattaatttatatttttagtaatagtgtaaaagtttttttatttttttataatttcgttagtatttggtgtttatgtagttttaaataattgttattttgattggtattagatggtattttatttgtggttttgatttgtatttttgtaattagtgatgttgagtttttttttatgtttttttggttatatgtacgttttattttgtgaaatgtttttttatgttttttgtttattttttaatgaagtttttttttatgtaaatttgtttaagttttttatagattttgaatattagatttttgtaagatagatagattgtaaaaatttttttttattttgtagggtgtttgtttattttgatagtttttttttttgtgtagatgtttttttgtttaattagattttatatgttaatttttgtttttgtggtagatgtttttggcgattttattataaaatttttgtttatgtttgtgttttgaatggtattgtttagatttttttttagggtttttataattttgtgttttatatttaagtttttaatttattttgagttaatttttgtgtaaggtgtaaggaagaggtttagttttaattttttgtatatggttagttagtttttttattattatttattaaatagggaatttttttttcgttgtttgtttttgttaggtttgttgaagattaaatggttgtagatgtgcggattttttttgtgaattttttattttgttttattggtttatgtgtttgtttttgtattagtattatgttgttttgtttattgtagttttatagtatatttttaagtggggtagtgtgttgtttttagttttgttttttttgtttagtattttttttgttatatgagtttttattggatttatatgaattttaaaatagtttttttttttaattttacgataagtttattttttaaaattaatgattaattgttttagatattatagagttttgggtgtttaggagaaaatagtttgaaatagagaaaggatatgtaatagtaattttgaattttttttgtgaatatttttaataataatgttgtttttaattagttaatatagttgagaatatagagtaattagattaaatagttttaagattttagtttgataaaaataatgttttgaaaataagattttgttttgtttaagatattttaaatttagtggaagtacgttttaagtattaatttttttattgaaatattatttttattaaatatttgtttatatttaaaaaaaaaaaataaaaattttattatatggagtagttatttttttgtttttttatttttttaataatttgtttttatttaggaaaatattgtttaattaaattgttttttatttataaaagtgtgaattttatattttagttaatatatttagtttagtatgatgttaataattttggtttgatgtagtagtttgaaatggttagtttaaattgagaaataagttttttttaaaagttagttatttggtgggtattatataataaatttaatattttttgttttggtattgaatgagatgtgatagaagttatttgtatattattatgattttaaataatacggttattatgtgtttttgaaattttttttttttttagtagttttattttgttttttatttatatttgatattttattattggttatttttttttattttttttttgtttgatttattttgattaattatttgtatttttaatttcgtaaaagtttaatttagttgtatgtgtggtagaatgtaatattaaattttttgtaagatggaattattttgtatagtagattgaatattgtataattgaaaatttagagagatgttagttagttaagggttaaatgatttatttttagttaagtttatttttttggtattttggttttttttgttatatgattttttataattttttgtggtttgtttttaatgtaagtagtttttattaaggatttttgtaattaattttggtattttttttttttatatttttttaaaattatattttaagttttatggtatatgtgtataacgtgtaggtttgttatatatgtatgtatgtgttttgttggtttgttgttttttttaattagttatttatattaggtattttttttaatgttattttttttttatttcgttattcgacgataggttttagtgtgtgatgttttttattttgtgtttaagtgtttttattgtttaatttatttatgagtgagaatatgtattgtttgattttttgttttcgtgatagtttgtttagaatgatggttttttgttttatttatgttattataaaggatatgaatttattttttttatggttgtatagtattttatggtgtatatgtgttgtatttttttaatttagtttattattgatggatatttgggttggttttaattttttgttattgtgaatagtgttataataaatatatatgtgtatgtgtttttatagtagtatgatttataattttttgggtatatatttagtaatgggatggttgggttaaatggtatttttagttttagattttttaggaattgttatattgttttttataatggttgaattagtttatagttttattaatagtgtaaaagtgtttttgtttttttatattttttttagtatttgttgttttttgattttttaatgattgttattttaattggtgtgagatggtattttattgtggttttgatttgtatttttttgatggttagtgatgatgagtatttttttatgtgtttgttggttgtataaatgtttttttttgagaagcgtttgtttatattttttgtttattttttatggggttgtttgatgggtagattgtaaaaatttttttttattttgtaggttgtttgtttattttgatggtagttttttttgttgtgtagaagttttttagtttaattcgattttatttgtttaatttggtttttgttgttattgtttttggtgttttagttacgaaatttttgtttatgttgattttttaagtggtattgtttaggtttttttttgggttttatggttttaggtttaatattgaagtttttaatttatttggaattaatttttgtataagttgtaaggaagggatttagttttagttttttatatgtggttagttagtttttttagtattatttattaagttttttagtatttttttttattgtttgtttttgttaggtttgttaaagattagatgattgtagatgtgtggtgttatttttgaggtttttgttttgttttattggtttgtatttttgttttggtattagtattatattgttttggttattatagttttgtagtatagtttgaagttaggtagcgttatgtttttagttttgttttttcggtttaggatttttttggtaatgtggttttttttttggttttatatgaattttaaagtagttttttttaattttgtgaagaaagttattggtagtttgatggggatggtattgaatttataaattattttgggtagtgtggttatttttacgatatggattatttttatttatgaacgtggaatgtttttttatttgtttgtatttttttttattttattgaataggtttgtagttttttttgaagaggttttttatattttttgtaagttggatttttaggtattttattttttttgtagtaattttgaataggagtttatttatgatttggttgtttgtttgttattggtgtgtaagaatgtttgtgatttttgtatattgattttgtattttgagattttgttgaagttgtttattagtttaaggagattttgggttgagttgatggggttttttagatatataatcgtgttatttgtaaatagggataattttattttttttttttttaattgaatattttttattttttttttttgtttaattgttttggttagaatttttaatattatgttgaataggagtgatgagagagggtatttttgttttgtgttagtttttaaagggaatgtttttagtttttgtttatttagtatgatattggttgtgggtttgttatagatagtttttattattttgagatacgttttattaatatttaatttattgagagtttttagtatgaaggttgttgaattttgttaaaggttttttttgtatttattgagataattatgtggtttttgtcgttggttttgtttaaatgttggattatgtttattgattttcgtatgttgaattagttttgtattttagggatgaagtttatttgattatggtggataagttttttgatgtgttgttggattcggtttgttagtattttattgaggatttttgtatttatgtttattagggatattggtttaaaattttttttttttgttgtgtttttgttcggttttggtattaggatgttgttggttttataaaatgagttagggaggattttttttttttttattgattggaatagttttagaaggaatggtattagtttttttttgtatttttggtagaattcggttgtgaatttatttggttttggattatttttggttggtaagttattaattattgttttaattttagattttgttattggtttatttagagatttaatttttttttggtttagttttgggagggtgtatgcgtcgaggaatttatttattttttttagattttttagtttatttgtatagaggtgtttatagtattttttgatggtagtttgtatttttgtgggattggtggtgatattttttttattatttttattgtatttatttgatttttttttttttattagttttgttagtggtttattaattttgttggtttttttaaaaaattagtttttggatttattgattttttgaagggttttttgtgtttttattttttttagttttgttttgattttagttattttttgttttttgttagtttttgaatgtgattgtttttgtttttttagtttttttaattgtgatgttagggtgtcgattttagattttttttgttttttgttgtgggtatttagtgttataaatttttttttatatattgttttgaatgtattttagagattttggtatgttgtgtttttgttttcgttagttttaaagaatttttttatttttgtttttttttcgttttgtatttagtagttatttaggagtaggttgtttagtttttatgtggttgagtagttttgagtgagttttttaattttgagttttagtttgattgtattgtggtttgagagatagtttgttataatttttgtttttttatatttgttgaggagtgttttatttttaattatgtggttagttttggaataagtgcggtgtggtgttgagaagaatgtatattttgttgatttggggtggagagttttgtagaagtttattaggtttgtttggtgtagagttgagtttaatttttggatatttttgttaattttttgttttattgatttgttcgatgttgatagtggggtgttaaagttttttattattattgtgtgggagtttaagtttttttatatgtttttacggatttgttttatgaatttgggtgtttttgtattgggtgtatatttatttaggatagttagttttttttattgaattgatttttttattattatgtattggttttttttgttttttttgatttttgttggtttaaagtttgttttattagagattaggattgtaatttttgtttttttttgttttttatttgtttggtagatttttttttatttttttattttgagtttatgtgtgtttttgtacgtgagatgggttttttgaatatagtatattgatgggttttgattttttatttaatttgttagtttgtgttttttaattggagtatttagtttatttatatttaaggttaatattgttatgtgtgaatttgattttgttattatgatgttagttggttattttgtttattagttgatgtagtttttttttagttttaatggtttttattatttggtatgtttttgtagtggttggtattagttgtttttttttatgtttagtgttttttttaggagtttttgtaaggtaggtttggtggtgataaaattttttaggatttgtttgtttgtaaaggattttattttttttttatttataaagtttagtttggttggatttgaaattttgggttgaaaatttttttttttaagaaagttgaatattggtttttatttttttttgttttgtagagtttttgttgagagattagttgttagtttgatgggtttttttttgtgggtagttcgatttttttttttgtttttttttaatattttttttttaattttaattttggtgaatttgataattatgtgttttggagttgttttttttgaggagtatttttgttgtgttttttttattttttgaatttgaatgttggtttgttttgttagattggggaagtttttttggataatattttgtagagtgttttttaatttggttttatttttttcgttatttgtaggtatattaattagatgtagatttggtttttttatatagttttatattttttggaggttttgtttatttttttttatttttttttttttaaatttttttttttattttattttatttatttgattttttattattgataattttttttttagttgatcgaattagttattgaagtttgtgtatttattatttagttttcgtgtcgtagtttttagttttattatgttttttaaggatttttttgtattggttattttagttagttatttattttatttttttttaaggtttttaatttttttgttatgggttcgaatttttttttttagttcggagaagtttgatcgtttgaagttttttttttttaatttattagagttattttttttttagttttgttttattgttagtgaggagttatatttttttggaggaggagaggtattttgatttttagaatttttagtttttttgttttgtttttttttcgtttttgtggatttatttatttttggtttttgatgatggtgacgtataaatggggttttggtgtggatgttttttttgtttgttagttttttttttgatagttaggatttttagttgtaggtttgttggagtttgttggaggtttattatagattttgtttgtttgggtattagtagtggaggttgtagaataatgtatattggtgaatagtaaatgttgttgtttgattttttttttggaggttttgttttagaggagtatttggtcgtgtgacgtgttagtttgtttttattggggggtgttttttagttaggttatttgggagttagggatttatttgaggaggtagtttgtttgtttttaggttttaagttgtatgcgggagaattattattgtttttaaagttgttagatagggatatttaagtttgtagaggtttttgttgttttttgtttggttatgttttgtttttagaggtggagtttatagaggtaggtaggtttttttgagttgtgtgggttttatttagttcgagttttttggtcgttttgtttatttatttaagttttagtaatggcgggtattttttttttagttttgttgttattttgtagtttgattttagattgttgtgttggtaatgagcgaggttttgtgggcgtaggatttttcgagttaggtatgggatataattttttggtgtgtcgtttgttaagattataggaaaagtgtagtattagggtgggagtgatttaattttttaggtgttatttgttatttttttttttggttaggaaagggaattttttgattttttgcgttttttgggtgaggcgtggtttcgttttgttttggtttatatttggtgtattgtatttaatgttatgtatttattgtttgatagtttttagtgagatgaatttggtattttagttggaaatgtagaaattattcgttttttgcgttgtttattttgggagttatagattggagttgtttttatttttcgaattaatttttgttgattgaataaatgaaatatgagtgtattaaaatttaattttattatagaaaattataaaataaataatattggaaaagattgagaaagtttttattttatgtaattagtgtgtatattaatttataaatttattttatttgtttgttgagattgtacgaattttatgattgtataataaattattataaatattggttttaaataatatttatttatttaattaatttatttatttttagagaaatggttttttttttttatttattttgaagtgtagttatatagttatggtttattgtagttttgaaattttgggtttaaaggatttttttggtttagtttttagagtaattagaattataggtaaatgttattacgtttagttaattaaaaaaaaaaattgtagagatgagagttttattgtattatttaggttggttttaaatttttgagtgtaagtgatttttttgtgtaagttttttaaatgttaggattgtaggtgtgtgttattatatttgtttaaataatatttattgatttgtttatagttttttaggtagaaatttaggtatgatgtagacggggtttttatttagggttttttaaagttgtgtttttattttgaatttttttttaagtatatatagaggcggtagaatttagtttttgatagtcgttgagattgagttttttgttttttgttagttgttaaggtagagaggagggagggttgtgtttaatgttaggagttaagtagtatttttttttagttagtttttttaattttaaagtttatagtggaggaaattttttatattgaattttttttatattgtgaatttttatgtttaggaagaatttagtttttttatgggtttatttgattaggattgtttaagtaggttaaatttagttttaagttaattgattgaggattttgattatatttgttaaatttttttatagtagtatttatagtagagttggttgaataattgggggaaggtggatgattaggagttggttgttggggttattatagaattagtttagtaagggttggattttttttttgtgtttaattgagatatagttggaaattgaagtttaagtaaagcgattattgtgaatgataataaaatatattttttttagttatggagatttattttattttttataattaagtgataggtttaatagtttataattaatttatgttaggtgtggtggttggtatttttaattttagtattgtggcgggtagaggaaggtagatttattgattttaagagtttgagattagtttgggtaatatggtgaaatttttatttttataaaaatattagagtattatttaggtatggtggtttatgtttgtagttttagttagttatttaggaggttgaggttagaggatatttgagtataggaagttaatatagtagtgaatggtgaatatgttattgtattttagtttttgtgatagagtaagatgttgttttaaaaatagtaataattatgattataaatttagagtaaatgaaaattgaagtgtaataaattatttttttttatgaaaatgtattagttatttattattgtataataaattatataaaatttagtagcgtaaaataataaatattatttatcgtagtttttaatggttaggaatttaggagtaaggtttttttgagtgtttttggtttagagttttttataaggttatagtttagtttagggttgtatcgtttgagagttttattagggtttgggatttatatgaaatatggtttatttatatggttttttgttgtttggttttaggaggttttagtttttagttatatggatttttttgtagggttgtttatggtatagtagttggttttttttagagtttatgattttagagatagagagagagaagttgtagtgagttttatgttttatatttagagttaaaaattgttatattagtattattttattagttagaagttgtatttgtttgtttttatattgttataaagaaatatttgagattgggtaatttataaaggaaagaggtttaattgatttatagttttgtatgattgaagaggtggttttaggaaatttataattatggtagaaggggaaggaagtatgttattttttatatggtggtgggagagagaaatgtaaggttgtggggggcgggggtggtagggaagatttttgtaaaattattagattttatagaatttatttattattatgagaatagtatgagggaattatttttatgatttaattattttttattatgttttttttttagtacgtggggattataatttaagatgagtttgggtggggatatagggtgaggttatattagaagtgtattattaagtttaagtcgaatttatagggaaggaattaagttgtattattggaagggaggagtattaagggatttgtatatatgttgaaagtaaaattaaaattattattttaggattttgtaaattaaatgttttttttatgtgattatttttttttaatgttttaagtttttttttaatttttattttaagttttagggtatatatgtaggatgtgtaggtttgttatataggtaaacgtgtgttatggtgttttgttatatttattaatttagtatttaggtattaagtttagtatgaatgagttattttttttaatgtatattttatttttgtttttttttaaaaggatatagtgttttttttttagtgtttatggatttttattgtttagtttttaattattagtgagaatatgtagtgtttgtttttttgtttttgtattagtttgttgaggataatggtttttagttttttttatgtttttgtaaaatatgattttttttttttttaaggttgtatagtattttatggtgtatatgtggtatgttttttttatttagtttattgttgatgggtatttaggttgattttatgtttttgttattgtgagtggtgttgtaatgaatatatatatggatgtaattttataatagaatgatttatatttttttgggtatatatttagtaatgggattgttgggttaaatggtatttttagttttagatttttggggaatttataatgtagttttttataatggttgaattaatttatatttttattaatagttaaagtatttttatttttttgtaattttgttagtatttgttgttttttgattttttaataattattattttgattggtatgagatggtattttattgtggttttgatttgtatttttttaatgattagtgatgatgagtttttttttatatgtttgttggttatatgtatgtttttttttgagaagtgtttgtttatgttatttgtttattttttaatggggttgtttgttatttttttgtaaatttgtttaatttttttgtagattgtggatattagatttttgttagatggatagattataaaaatttttttttattttgtaggttgtttgtttattttgattatagtgtttttttttgtgtagaagttttttagtttaattagattttatttgttagtttttgtttttgtggtagatgtttttggcgattttattataaaatttttgtttatgtttaggtaaatggtattgtttagattttttttttgggtttttatagttttgggttttatatttaggtttttaatttatttagagttaatttttgtgtaagatgtaaggaaggggttcggttttagttttttgtaaatggttagttcgtttttttaatattatttattaaatatggaattatttttttgttgtttgtttttattaggtttgttgaagattagatggttttagatatgcggttttatttttgagttttttatttttttttattagtttattattatgttgttttggttattgtagtttgtagtatagtttgaaattaggtagtttgaggtcgttcgttttgttttttttgtgtaggattgttcgggttatatgagtttttttttggttttatatgaattttaaaatagttttttttaattttgtgataagtttttttttttaaattaatgattaaaagtttgagatattatagagttttgggtgttgtggggaaaatagtttgagatagagaaagaggatataatagtatgtttgagttttttttgtaaatatttttaataataatattttttttaatgagttaatagttgagaatttagagtaattagagtaaatattttaaagatttttgtgtcgtaaaaataatgatttgaaaataagtttttgttttaattaaggtgttttatatttagttgaagtatgttttaagtgttaatttttttattgaaatattatttttaaaaaatatttgtttatatttaaaaaaaagggttgttgtgtttattgagtagttatttttttgtttttttattttttttataaatttgattttattttaaaaaatttgtttaattggttttaatttataaaaatgtgaattttatattttagttaatatatttagtttagtaagatgttaatagttttggttggatgtagtagtttaaaatggttagttttaattgaggtataagattttttaaaaattggttatttggtgagtattttataataaatttaatattttttgttttggtattgaattagatatgatagaagtgatttggatattattatgattttaaatagtattgtaattttgtgtttttaagtttttttgagtaattttgttgtgttttttatttatatttgttattttattattggttgtttttttatatttttttattgttttatttattttgattaatgatgtgtatttttaattttgtaaaagtttaatttagttgtatgtgtggaatatgtaataaattaaattttttgtaagatggaattattttgtatattagattgaattttgtatatttgaaaatttagagagatgtttgtgagttaaggattatatggttttttagttaagggtattgttatggtattttgtaaggagtttttttgttatgtggttttttataattttttgtggtttttttttaatgtaagtagtttttgttaaggatttttgtaatgaattttgatattttttttttttattttttaagaaataggtatattttagtttgaaaaatattgtttaaggagttataatttagtagttatttgggtttttagtattggcgtaagatatagaattcgtaaagttattttgggttgttgtttaattatattttttagaatgagattttattttgagttttgtttttattattattttgtatttttttaaatatttgtataataagtatatataattttaaattaaatattagttttattggtttttaagttttttgtatagaaatttttattgtatttttttttttatgatgtatattatgtataggagttatttgttgtgtgggaggttgttatttatttatttttattgttgaaggtttatattttatggttatattataattttattattttgttattgatgtataggaggttgattttagtttttgttataaatattagtgtgtatgttttttgggtatataggcgagaaagtcgttagagtgtatgattaggagtgggatggttggatgatatgttgtatggtttttaattatattaaataatgataatatgatttttaaagtaattgtgttaatttaagtttttataataaatgtgtaatatgtgatgttgatgtgttttgaaaatattgagttgaaggaattaagagttaatagtaattgttttggttgtagaattatagtagatttttttttttttttttttttgacggagttttgttttgttatttaggttggagtgtagtggtataatttcggtttattgtaagttttattttttgggtttacgttattgtttcgttttagttttttgagtagttggggttataggtgttcgttattatatcggttaattttttttttgtatttttagtaaagatagggttttatcgtgttagttaggatggtttttattttttgatttcgtgattcgttcgtttaggttttttaaagtgttgggattataggtatgagttattatgtttagtttatagtaggtatttttatttagattttgttaataattttttgttgttaatttgtattttatatattatggttttatatttttaatatatagatttagaaaatgtttttttatagtataaatatatagggttattttatatgttagaatatgttataataaaaaagaaaaaaatggaggaaaggagagaaagaaggagagaggagtgaaggaagtaaagaaggaaggggaagagaaggagggagggagggtaaatggaaatagaaaagaaagagagggagggagagatagaagtgagaagaaagggaaggaataaaggagaaaagaaacgaaaataaagaaaaaaataggcgtagagaaattaggaatttaatatatggttaatattattaaaatgggaggaaataaaacggatgtatttaatttttatagaataatagaaatgtaagagggttttattagttatttattgttgtataataaattatttttaaatttagtgatttaaagtaataaatatcgattattttaaaagtataatataaatattagtaaaatggagttaatgtaggtagaagaagttgaataaataaaaggattttataaattggagtaagtaagaggttattggtgtgtagatgaaaatgattttgtattttaagtgttattatgggattaaagttataggattttattaggggatatatttgttagagatatagtaacggaggtaggttattttgggaaaggtaatagattaagatgtaaatgtgatttttagtgatggatagaaggatagaaggtttattggatgtgttttagattataggtaattttaggagagttgagtaaagttatggaggagtttttgagttattgttgttcgttagaggagtttttggttttttaggaatgttttgttttaatgttattggtgtgatttattattggttgggaatagtttatgggaagtagggtttttgtattaatgatattgaggatgttagagtataggagtggggttttgggtgattatttaggagtgtggtttaaattttttgttttgagaggtttgggtttttggaaattaaatttttttaggttggattgttggatgattttgtttatatttataaagggataaggtaaattagaaggtttttaagtagatttttggtttttatatatatatttttgtttttattgtgtgaaagtagttatgtttttttttggagattaggatttattatttgtatttggagaggaagagatttttttttttattagttggtttttgggtatatattgtttaaatttttttggtgataattataatgtgtagtttaatgggttgttatgtgtttttttttaaggattttttgttttgaatagtttaaagttgggagataaaacgtgtaaaatattttagtgggtgaatttaagagattggatatggagataaatttgtttttaattttcggtttttagatttatattttttttttattgagaatatagtatcgtagagatgtttttgatttaaataatgtattatgttttgaaaaacggtttttattttttagagtgttttttttaggatgatattgagttttgtttgtagaagatatttttagtattttttgtggttggtagtttttgggtggtgtagatggtgattagattagtgaaatttatagttacggaaatattggaattttttttgttaagtgggttttttaggtagatattgggttgggagtatcgtttagtttgtggattaggaatgttaatagtatttagagagtggtgttggttgagtgttcgagagtaggataggaaaatttatttatggaatatgagtttatttttgtgaagatgaattttaggtttttttaggatggaagtagttaaatgtagttaatttgttatatagtggttagttagttatttaaagaaatagtgttttacgagggtatatggtgggttttaaatgttgatgagttggatatttagaggtggtagtagttggatttgttttgataatggggagttagtatttttggttttatatgtagttttaggtttgttattgtgtttgttttatttatgtgtttattttattaggtttgcgttgatttatagtgaaggttggttaatttttatttgtttgtttggttgtttagtgttgttttagatttgggtgttttttgggggtgttaatatgggatttaagtataatttaggtggattatttttattttatgatgaatgttgttgggtttgtttaatttatgattttttgggttatatagaagttaatttatataggtatttggaattatattattgtttggtgttttgtggttaagtattttatcgaattaggattaggaatattaaaagttgtttttaatggggagttatgtttttgttgtggatgatatgattttattttagattttaggttttttattatgatttttttattgttgtttggtttagttttattttgtatttttttttatttttgttttttttagtattaagaggtttgagggatggtggttgtatcgtagtttgtatttgttgtagggtgtttttttgtgtaggttttatttgaagttggtttttttttatgttatttagagtgtgggttaaagtaatatttttatatgtggaatgtgttgtcgttagaattttaagaggtttatcggggagtgtgttttttttttttgtattaaggatgtaaaatgtaatattttgtaatttatttaggaggggatatttttgtatttttttaaatattggatttataaaattttattatagtgattttttttgaagttttgtaaggtttatttttattttttgaagtgtaaatgttttgttaacgatgttagtgtattttttatttgttgtttattcgttttagttaatatgaagttgtgaatgaaatgagttgatttaatattttttaggatatttagtatgtttagtatagttataagattatattatagaggataggggagttataaaagttttgaggtaaattataatttaatgtgttgtggattttatatgaatgtgaattattttatatattttttgtaattggaatggaaagaaatgtatttattaaatttatagttgtatattgtgtgtttaaggttttgttaatttgttttattagtgatatttagatagtataaaagttgtatttataatttttatttggttatatttggagtaattttatttattttttaggttttattaggtttttttagggatagattgttggattatacggagataataggtagttttaatattatttcgttttttttagttttgtaatggtggtgtgatttttataatatttgtagtgttttttataagatttattttgggatatattatgatttttgatttggttaggatgggggtagttttagaggtttttttttggtttttggtattaagagattttttatattatagattggggatttagtgtgggggtgattttatttattagagtattagtgttaattatgtatttagggaattggaagataattagggttgggtttatgtatttagtggttttattgcgggttataatgtgtttaggtttattttttggttttcgtaagttttattgtgatggagaagatgattgtgttgtgggtatttgggtattaatattagtttatatgtaatgaaaatgatttttttagttttgtttattttttttttttaatgtatagttttttgagtaaatggttataggtttttttgtcgaaagattgagggaattgttttagttatatatttttatggtgttttagggttttttttttagggatatggattttttttttgttattgagatttgagtttgaattttgattgaagtttaggtattgagaaggggattatggttttgtatttggtcgaatatttttagttttttgttttttaatttttgtttttttattatatatattaagtagtgtttttgttggttgttttttgtaattttggtgttttttttattaattttttttatattttttgtagtttgagtttttttggttgtttttttgaggttgttatggtaattatgtttttcggtttttgtaggttattgttattatttgtttttagtttttgtaggtttatattttttttagagatatgaataagtataattttgggatttttattattattacgtttagtttgtagaggataatatttcgatattttttagtgatgtaggtttttttttatagtatgtttttgaggttttggtggaaggtgtgttttttgggtttttttgtggagtatggttttggtgggtttttattatatttattttttttagttttgttattgcgttttttatatgttttaggataattaggttatatttattttgttgagagttgggtattattttttttagtttatatggatttattttagtagtgggtttattttatgttttgggttttttgataaatttatgttttgagaaagtgtttttaagttaaaggatttttatttatttagattgaaattttagtttattgattaaatatttttaaattttaattttagaagtgtattttaggtttttatggggatatgttggttagtttttgtaaagtttttgagtgggatttttgttgtatcgtaggggtgaggtttttgtagtattttttagtataggaagtgggaacgattattagagaagggtgagttttttttgtatgtttagggggttttgggggagggtatttattagataattttgttttagtttgtagaatttgaggtttttttattagggttttgatttttttataaaaggtttgtgttggttgagtattaaacgtttttggagtattgtgtttattataatgatgtttagttattattttatgttatttgtttttttgatttaggagataaaggtttttttatgagatattgtagagatttttatatatagttagtgatagttgttaataatttgtagatttttattatttttttatagagtattaatatagttgggaagtaattagttaattttattgtttttgtgggtttatttttaattttattattattgtgtagggtattttattattatattttttatagttttttttaattagagtatttttttaggttagtattggtgagatttacggtagtttagatgtaatttttttatggattttttttgtttttcgttaatttagatggtatttttttggtttgataggtagtgggaaagtttattttaaatttttagttttggttatttttatggatcgtttttgatattatttgtgatagttgcggttttgaagttagattttaatatagtattaaatgtgtaaggatttattaggggaaatagttgtgagagaaaattaggatagagatagaaatgttggaaaagttattagattataatgtaattttgagttttagtgaaggagagagggtaggaaggttagttggaagtattttagattttgtgtaggttaagggaagtttagtagggatggtagggagttttggagttttagttagttttcggagtaggaatatttttgttttagtttttttgttttggttaattattggttggaaaaagttggggtaggtgtggttttagattaaacgtgataatagattttaggttgcgatagttgggatattattaattattttttttttatttgagggtttgggatgtgtatttttatgagtgttataatgatttattggaataaaaggaaaagggatgataatagagggaaaaaatggtattaattgatgaattaatattttaagtagatgagaagggatgatgtttagggtgttagtagaggaattggttttggttgggagtaggatgtttaatatatagtaattttttatgtagtaaaatgtttgatatgtggtgtagttgtaaatgtatgggtagacggtggtggaatttgtgaagttgttttttaaatgtgtttagtttttttagtgaagtaggaagtaagattattagcggaagtaagaatggggaaggaggattggatgtgtgaggatagagagaaggtatgtaagagttatttaggttaggaggaggttgagggtgagttatgtagggagagggtgattgttggttatggtgggggttttttatgaggtttgggtcgtgaatgtagagagaatagttagtatgttgtgtgttgttttttagttttttgtagtttatgggggtaggtgtagtgtaggttgaggtggaatttattagttgtgtagttttgttaggtaagtgtgataacgaaagggagaggtaagggagggatggaaattatttattatagaatttaaaatggatgaggagggaggagaggataataaatattaagggagaaggaatagatagtagtattattggattgggaattttaagggggtggaaaaattattggaatagatgtattatagaatggattttatgtttggaaagtaggtatatatgtaatgagtggtttattgatgttatattatagtatatgattaaattatagtattagtgtttttagagtttgtggttattttgtaaggggatgagtggaaagatggttagagagtgggaagtgtgagattgagagtgcggaagggttggggttttttgttatgatgaggtttaggggaggataaggttttgagatttcggtagagagaggagatggtaatgaagaaaaggagttttaggatttgagaggttagggagtgagggtattttttttgttgtataggtgtttattgttgttataaaaattattataaattaagtagttttaaatagtatttaattattatgttatagttgtgtgggttgtaagtttatttagttttacggggttaagattaaggtatgggtaggtttgtgtttttttttggagaatttggggaagagtttatatttaagtttatttaggtttttgtttgaatttattttttgtagatagaattgagttttttattttttttttgggagtatttttagattttagagatttttttttggtgtttaaagtatatttaatttttttgtttggaattattgattttttttttgttgtgttttttttgttttttttttttgtagtatgtgattttatttagagtagattttttttttttaatggtttatgtgatttgatcgggtttatatagagagtttaggattatttttttattttaaggttttttatttttattatatgagtaatgttttttttgttatgtaatgtaatttgtttatcgattttaaggattaagattggatttttttggggattagtatttagtttagtatatttgtatatgttgaagttagaaagaattaaggagatagtattgttggagagggtgatagtgatttaggagttataagagttaggattgataggaatggtttggggtttatagggaatggttataatgaggggagcggggttttagtttgatgatagtttaggggttttagggaggagggatgtagaaaggtttgagaattatagtgaagagtaaggattttattttatttttgaatttaggggtataagttgttgggaaatttttttatgtaggggaattttagagcgggttatatttttaggaagatttggtttttgttagagtttcgaggtgagggagtattttgagagagaatgaggaggttttgttgattatggattgaggattttagggagtatagagggaagatttttggagttaggtaggggatatggtggggggagagaatagagcgtgcggagttttgtggggatgtaagtgttgggtatatgggggatttagtgtgattgatataaatagggaaagggtatgaggagtttagttttggtggattcgaggcggacgatggtgttgaggttgtgggagatgagggaggaggagtaggggtggttgttatttgggttttttttatggaggtgaagatagtgaggtggttgggttttagtgttgtgtggattttttgatgattggagggagtgtttgagggaggaggggttttagaggatttattcgtgattttgagggagggtatgtttttattttaggttttaggtgtgttttgatatttttttttgtggtttagggttttttattgtaaattattggggattagtattttttggaatttgtaatttaaagtagaaatttagatggtcgaaatgttatttttatgaaggtttgttattagcgtattatttagattgttttgtaaaagttttattttttgttgtttttttaaagggttgtcgattttgttttaaatttataaatattgataatttatttttattgttaattggttgggggttgtttaattttgtattgtatagttttatatatttataataatagtggtttgggttttttatgttttaataattaagattttaagttgtgtatatattgtaatttaagtatgagttatgtataattttggtattaagagataagagggaaagttttttttttttaaaattttgtaaaggttttgggttttttttttattgagtgggaacgagttagttagtgaggaatatgaggtttttggttttatcgaaaggtgatttattttttaattgtgagaagtattgattattaggaagatttttttgtttggtttttggatttttatattatggtagaggttatttttttttttattgtaaagtggtattttagatagtaagttggttagttgttgttagtttttgggtagttttgttttttaaggtatgggtttttatttgaaaatttttttttttttagatgatttaaattggggttatttatttttttttgagttatttttgtttagagatttgtggttatgttttttagttataatagaatatttttttagaatattttgtaggaagttgagatttttatagatttatatgaatggtgtgtgtatagagttttggttttagtttaggaggtgtggagtgaggttcgttagtttaatagagtttgaggttagtattagtgttatatgttaggaggtaaggttataggggatataaagtgtttagatttattagagaaggtaaatttttgtaataggtagggttagatagggataagaaataaggttattttgggttagtaagaagagggaaagggaaattatagatatattttagagagattgtagatttggttttagattatgtaaataaaataagttatataatttttttgtttttgtagtgtatataaaagttatatttatattttagtttattaagtatataatagtattatgtataaaatagatatgtatatattttaattaaaaattatattattgttaaaaaatgttaatagttatttgaggttttagttaatattaatgtttttgttggagtagggttttgttttaatgttgatgattgttgattgatgataaggtggttgttgaaggttgttgtggtaattttttaagataataaagtttgtggtatggattgtaaagtgggaattagtatataagtaaggttaatatgagtttttaagttaagtggatttgaatatgaattttttaggtttttttattagttagttatagaattttgggtatatttggtttataattggttttgatagatatttttatagtgaatgagtgttgaatgaaattatatgagttagtttttttatttgtaaattagtgatgtaatttttgttttgttaatttagaagaatatatgagaagaaatatagtgttaagaaaaatagatataagatttgtggaaggttgggtattagtgttttaaagtaagatttgtttaaattggtaggaatattttttatagtagataggagttggtttggattttgtttggggttaggttgagagggaggtgggggtagtagaacgggataggggtaggggtttatgtagggttaggtattgaagtaaagtttaggtttggaagggcgggtttttgatgtttgttaggaaatttagatagttttttgttttattcgttatggtttttttttttttaggattttttagagttgttgtttttattttttttgttttggaaagtggagatgataacgaaaagttgttgttaaattaaaggaggttattgttttttttttttttttggtttttagtattttaggatttataaagatgttgttttgaaaattttaaggtaagcgtggaagagtagaatagttttaggggtagtgggaagatgagggtattttcgtatgttgatagatattaagggtgggggtggaggagatgaaggggattagtataggagtttgggggaaattttttaaattttattttgtattaattttatttttgtagttttttgtgtagttatagtttttagtttttagtttttttttaattatattttagtttagattttagggtttttttttttttttattttttttagagtagtatagtttatagagtttttgaaaaggaatttttttttatttaatagttaattattttttagtggggagggatagtcggttttttttttttagtgattttatgtttttgtttaaggtatttagttatattttttgagttagggatttttaggttagttgggatttaatagtttttttagttgtttaggggttagtatttatgtaatttggtatttgtgtttggtattttttttagatgtttggttgttttcggagggttggagtttaaggagttggggtaagtaggtggtaattaggtaaagtttgagttgtaagaagatagggatattggttattttggttattgtagttttattaggtttttgttttttgtggaggtagaatttattatatgttagttttttttgttgtaatgaatatgaatttggggttggtgtattgatataataaggtttgttttgttgtagtagtgttgttttcgtgtaagagaaataaaggttttaatataatatttgtttgtgtattttatagtttaagggttaatagagtatttgtgggaatatagtggtttatattttagttaggattttataaggattgaattaaatgtagggttattagttttttttggttttaaataggagttttattttgttttagttatgatttttatgttatgtatatgtggtaggggtttgtgtgtttagtaaggatatagtttagagagttttttttattatttagggtgagtggttggaaaaaaaaaaaagttgtttacgtttatgaggttttggagggaagtatagaatttattattaaatttttttgggttgatttattttaggtatggttttttttgtattaaagttgtttttttattgatttattgatagttagtttttaataaaatagtgtgtggagtagtaaaatttatgtcggtttgagagggttttagatatgtaatgatgtttggtggttttggttggggttattttatggttgtttttttttttgggcgtttttcgtttttattttattggagttatggtgggtttatttgttttttttttttatttttattttttagggtgggatgtagtggtgtgtttttttttttttaatagagtattggtgttttttttggagtttagtttttttttttatttttaagtttgttggggaggttttaattttaggaagttggttgttgggtatttattatgggttttagttttggattataggcgttgttatattttgggtggaaaggaatttgttttttttttgtaaagtaaaggaaaatggaatgagggtaattaggttgattttatgatgtttatgggtttatgggaatttgaaagatttatttttttttttttgttttaagaagataaatggagaaaaggagtttttattaagggaaaatattgattttatttttattgattttatttttgaaatggaatttggatttaattttaaaattgaatttatttttagggatagagttaaatttaaatattgattttatttttgaaattaaattataagtaaataagaaatttatgagatttaaattaagttatttaagtaaattattttagaatttaaagtttagtaatgataagatattaggaaatagtgataatttttttattttataggtgagtttagtgagattggttagggtttgttgtttgttttttggtgttgttttggtattttggaagtatttatgattttgtgaattttatttatagttgtttagtaatttttttttgtttatatgagttagattttgtttttatggtttatatttaaataatttaaggtatttatttatgagttatacgttttatgtggagatagggaaggagagttaggtattttttaatgttattatttgttaagtatatatatatgattttttttttttttttgagacggagttttattttgttatttaggttggagtgtagtggtatgattttggtttattgtagtttttgtttattgggttgaagtaatttttttattttagttttttaagtagttgaggttataggcgtttattattatgtttagttaatttttgtatttttagtggagatagggttttattattttggttaggttagtttcgaatttttgattttaggtgatttattcgtttcggttttttaaagtattgggattataggcgtgagttattatgtttggtcgaaacgttgttttttaaaggtataattttggattagagaaaatgttagtgtatttaagtaaattttatgaagaatgtgaatattgtaagtaagtgtattatttttagtttttatttttttatagagttattatttatttttttttattttgttttttatattgggaggtaattatgatagatagacgatatggtttgtgtttttttattatttggtttgtgtttgggtgtggatgataataggtatttgtaggagatgggagtgtgggaggaggagtaatttagggtttttattttttttatttattttgggtagttttgtgattttgtaattattttaggtttttatttatagttataggtatggcgggttgtttttagtgaaagttatagatttgtttgagttttagaaattgtttttttttttgtttttttaagtttagaaatgtaaattattttttgttatagattattttagggagttttagtgttttttgtgatttttttagttttgttagaatttttttaaaacgtgttttttttttgtgttatattttttttgttaggatttagattatagggtgtttttatagaaaaagggataagaatttatttatgatatggtaataatatatttatttataatgcgaatttaatttgttttggaagagattgggttttgttatgttgtcgaggttggtttttaattattggttttaagtaatttttttgttttagtttttttaaagtgttaagattataggcgtgagtgagtgtgtttaggttttaatttaaaaatttgatttattataataaaagggaaataatagaagtattttggaaatggaataggaaagaaggtagaggtgggaacgattaatttgtgttatttgagaagttttatgtgtagaggttgttttgggtttttaggggacgataataataaagtatataggattttggtgttagggatagagtatggttattgtgggatatagcggtttttttataaaataatgtttatatatattttttatgaggaggattagattaatatataaaaatatgttagataaagtggaggcgagggtaggatggagagttgttagtatttgtttttgatttttatggatttgaagaaaggtttagtttggagttgtgtgaggttttcgatttggagtagtatttatttttaaagattaggtattaattataatgtaaggagagatttagataaataaataggaaatgattatagtaggagttttgttgagtatagagcgaggttatatattatttagtatttggttttttattcgtttttttttttttatttgtttttgttttagtatagtagatttttagaatttaaaaagagaatttaatttttatgttttattaatggttgataatattttattatagttttaaagaaatgatatgagaataataattaatagagtaagaagtttatttagggtgagtgagtgataagggaaatttaggagggagatattgtaatttttttatttttagaaaagaaatgatggtttagggagatatattaggtttggatattgagattacgtggaaggggttttggggtattagaggagtgggttttatttttattattttttttttgttatgtttgggaggagatagagtttattagttgtatagttggggaaagagaagttagggttttttaagagataaggggagttgtgaataatttgtgttttgttggtttgtataaggtagtttttaaatagtggagaatatgttaatgagtagatttagtttagttatttttagttttgatattttgagtattatagatagttcgtgattaatttttatttttaaatttaaagattttttatagtttgaagttttttttcggttttaatttttgttggtgttgggttttaagggttatattttaggaagttgtgagtattatattagtattagggattcggttattatttggagaatgataataaaaagatttagtagagtttgtaggagattgtatttgaggtaggattataggataagtgaggaatgagacggtggttttattttgtttattttaggagttagagatgagttgtttttatcgttttttttatgttgttttttattgagtagattttttttgaagtttttttgaggagagaagattttgttaggtgttatggtagagaggggttttgtgagttttaaataattggttaatatagttatttagttgaaattaggaaggtaaatttaggatttaggagaggagaaagagatagtatgggattttgtagttatttttttgtatatttgtttgtagggagggttttttttgtagggttgggagtatttagtattgaggttttttgagtatggttattttgttgtttttatttgtgaatggggttaggtttgtttttttttttagtataaatagttaggggaatttatttataaaatatttgttagttttatattaattttgtattagtttgatttaatattttatattttataagaaatgaaatggaagaatgatttttttggtaaaggtaatttagatttttggggttttggatattttattttattgtttaaaatttttatggaggattaggagagtatagagtttagaaatagttacgagatttgaagttttttggtgtaaaggattttttttcgtattttggggtttagagtgaatagtttttattgttagtttgattgtttttagtttttttggttgttaagtttttggtttttagtagtttttttttttattttttattttttttgattggggttattggttatttgataggttgtattttttttgttagttagtttgtttatttggtttttttttagggtgtgtggtttgattgggttaattatttttagttttagtagaaatagggagaagtgatttagtaaattttttaagagtagtgggatttttatatgtgagatggggtaaagttattattttagttttttttatatttgagaattttttgtatattataagtttaaggattatagtaggaagtagttttaagttagagataagaatagagtagtgataagaggttggtgtgaatggagattagtaagttttattgagagtagtgggatgaggttatagatgttttgtgttgaggggttagtaggaaatggtgggagattgggattttattgtattaagaaaggaagaggatggagtgttcgtgggatgtgatggtgaggatgtgtagtaatttttatttgaaaggttcgttttgtttgttgtatgggtgatggatagtaggtgtgagaagtagtaggtagtttagttggaaggtttatttgatttattattttagagaggattggttttggggtaaagtagtagaggagtgagaagtgattggatttggggttaaatatttaagatggtgttagtaataagttaatggagaattatatatttatttatttaatttaattttatagtttatttttaggagtttatagtaataaatttatggtaataaatatatatgaattattttaaaaataatattaaggaaaatataaattttagaatgttaaggttggggtaaagttagaatattgttaggtacgaaggagtatttgaaatatttgttgaaatggtttattgtttatttatttatggatttgttggtttataattttattgtattagagtattatggagaggggtgatagtgtaggttattaatttttagttttttgttttaggaatagttttttgttttatatttagagttaaagtaaattatgtaattgtaagatgtttaaagatgaagttaacgaatgtaaagttagtaattaagtataaaaattttttttaaggagagtttatattttttttttagaaatggttttattgtgtattgttgaagggagagggtttttttaaagagtttaagaagtaggggttattgggttgtagttttaaatagagatgttattttttttatttgtaggttttgttaagtttaatagtagattttagtgattttatttgaattaggaattcgggatttttgatgttggttttatttgagttattgtgtaagtttaaaaatgtgatatggagattttgttgtaattgtttttttgttggaatttgatatttacggtgtttttggttttttttttggttttaggagggaatggattgtttagtatttttttttagtatttttttgtgggggggggattaggagatttggagttaggggtttttttaattttatttttttttttaatgtagagttttttaagttttttggggtgggggcgttggtattttgcggattttatgaataaaattgttttagtttttgaaataaaggtataggtgtatataaatacgttgatttttgtatgtagtgttaaggtgaggaagttttttatgatagatgtcgagtttagtattttgattttttattaatatttatatagatatatatataagcgcgcgtatatatataaatatatatatatatatatatatatagagttaaagttagcgatgcgggaggggttgattttaggggcggggttataggtattttttaggttttttttagtggattttgttttttttttttggaggtggaggagtttgtattttatgagaagttttttgaagaaagtaggagatatttaggagcggggaagtggagataaaggggagggggcgaggtaaggggggagtacgtaagaaatggggagggggaggattttatagtggttagaaaagttatacgtagaatttggtttttggtttttgtgttttattaggatggatttagaaaattagatagagtgcgagataaggagtttattttgtaaaagatacgttttagtgtttttttagtttgaatttattagtagtagttgggagaagggagtcgggacgtttgtgtggggtacgttttttttagttgtttttattttttgtattttatcggttggtgttttttaattttaataggaaggaaaggaaggaggggtcggaaggttttgggttttttttcgcgcgttttttttttttgttatttatttcgagtgtttttgtttttttttcgttatttgatttttattttaataaagtatattttgcgttgttgggttaggattttttttttggtttttgatttattggtataatttcgttgcgttttgtttttatcgtaattgttattgggtagagtcggagagagtatcgtttagattcgttagatttatgtagcgttattgttcgtatatttttgatatttttttagatttaaagttagagtttgagtttttagattagtttcgaaagtttttagttattggaaaggggaaattaatattttaggaataaaatttgtttcgattttgttttaatttaaagatattatgacggcgtagtttttaaagttgttttgagtataaatggaatagggttttttgtgttagattcgattttgcgtttttttttttattatagtttttttgtaaattttattatatgtatttttattttattaaaaatatttttgttaaagatattaagaaagagttaatgttatgaaaatatgaaggatatttttaaaagagagtttttggtgttgagttttaattaatattttggtatttaaaaatttttaattatttgggtttggggtttagttttataatgttttaaattgagatatatttttttttaatttttatataaatttaggtttatttttatttttaattgtatttatttttttttttttgaaataatgtttttattcgttatttaggttggagtgtagtaatataattatagtttaatgtagtttcgaatttttggttttaagtaattttgttttattttttagagttgaaattataggtataagttatcgggttaagttaaatttaagttaatattgtaatataaaattttaatattttagagaaagtgaaaattattaagttattgtagtttttggagttattgttaagattttggtgagggtttagtggtttacgtttgtaattttagtattttgggaggttgaggcgggtggattatttgaggttaggagttcgagattagtttgtttaatatggcgaaattttatttttattaaaaatataaaaaattagatgggtgtggtggcgagtgattgtaattttagttattagggaggttgaggtaggagaattatttgaattttggaggtggaggttgtagtgagttaagatcgtattattgtattttagtttgggcgataagagcgaaatttcgttttagaaaaaaaaaaaaaaaaaaaaaaaaaaggttaggcgcggtggtttacgattgtaattttagtattttgggaggtcgaggcgggtagattacgaggttaggagatcgagattattttggttaatacggtgaaatttcgtttttattaaaaaaaaaaatataaaaaaatataaaaaattagtgtggtggcgggcgtttgtagttttagttattcgggaggttgaggtaggaggatggcgtgaatttaggagaatggcgtgaatttaggaggcggagtttgtagtgagtcgagatcgcgttattgtattttagtttgggcgatagagttagattttgttttaaaaaaaaaaaaaaaaaaaaattttggtgagaaattttttaggtttttttttatttaaaatatatattatggaagtggtattattggtattataatttagtatatttttattttttaataaatggttaaaagtatgagacgtatatatttttttataataatatttaaaattgattttattttttttatgattttataaaattgtattgtatagtagttttttggaggacgatggaaatgttttatatttttattgtggtagtggagatgtgggtgtgtataatagttaaaatataacgagttatgtattttaaatagatatattttagatatatttgattgtatgtaaagtaagttttaataaaatggtttttaaaatatattttttttgagatttgtattttgtttatgtaaaataaaataaaataaaaattttgtttttgtgtttaagagatatattttgatatatcggtaggtagaggtttacgtgtgtatatatattattgtatatttatagatttagagagagagatagagataaagttatgttaagaatatttatatatattaaaattagataaaaattaaaaataaaagttagaaataataaaattttatattttaaatgttatttttttttttattttttttttttttttttttttttttttttttttttttttttttaatacgttttttttatttttattttttagttatttttttttatttttttttttttttgtatttgattttcggtgtattttagtttcgaggttaatatacgttatcgcgttcgtttggggtaggtcggggaagggacgcgaggcggcgttgttatcgtattttgagggtcgtagtgttttgcgtttttgttggttttgtattattttagtgaacgtcgttttagtttttgatggggttatattcgggatgtaaatttaggatttttattgaaggggcgggattttgagaggtttttttttggttttttagttgtgagtttttttgtaggcggaggagttagttttcgttagaatcgtttagaggtaggcgttgtttttttggggtggcggagtagttggaagcgttttcggattttggaattcgtgggcggttcgtgggaggggttgaggcgtatttttttatttattcggattcgaatttatcgcggtgttgttttaagcgagttagattttatatcgcgttttatttcggattcggaatttttgttttataggtttgtatttttatagcggtagttgtgagtgtttcgcggttggagattagaagtttgaaggtaatttcgttttttttagtttatagcgtcgttatttcgtttttatattagtaaatatttgtagattagggcggggtgacgggtgattttagttttcgtagtgaatttcgggtcgtaggtttgaaaacgcgcgcgggcgtttagtttaatttcgttttgggttttgtaagcgatcgtattgggttttttttttttttttttcggatttagtagtggcgtttaaagtttgcgaggaggaagtcgtttttgtgtttcggagtttagaggtttaaggcgagttttgaggaagaaaacgtagttgatggggtagagtagaaggggttggaggtggggtggagggagagggtattggatagaaggtttgggagatttggtgggggacgggtagttaggtttggattttggggagtgttttatttcgagcggaagattatttgggttttttttagtttagaaagggtggattggttttatttttgttggttattatttttatatgttttggaattaattttgtatattattattattgtcgttatttaagtattaaaagtattttttggggtgagttgaatgagattttttgttagagttggtatagggaggaaggtcgttttggagggagggtagatattgtggagggaagggagatttttgttaggagagttgagattatttttttgttttttattatttttgtaatttttaggagtgtaaataatttttttaaggtggggataggattttagtttttgttgtgcgtaatagattatgatgattaaaataaataattagtgaatgtggatgggaaatttaagtaattgttaaaattttgtgatgtttaaatttttatttatagaaatgtgtaggttaggagttttaagaggaatggttagtaattataggtatagtttagttttaaaaaatgtttgtaagagtgataaagatagaatgaatatagttttagattatggattgtttatcgtgtagtgggggatggtataagatggtagatgatagttgggtatggtgatatttatttatagttttaggtatttaggaggttgaagtggttggattgtttgggtttaggtatttgaagttgtagtgagttgtgattatattgatgttttttaattggcggtagagtgagattttttttttttaaaaataaataaataaataaatagtagatggagtttaagaatgtaggtaaagttggtatttattagggaggtttaaattatgggttagaatagtggttttaaaatttgtttatatattggaagtacgtagagagttttaaaagatattgaagtttaggtttaatttagttttattgatttaattggttttggttgtgatttgggatcgtggatattaaaaattttttaggtggttttgtgaagtggttaggtttgaggattattggttagatgttttaaagagtaagagacgtgtgtgttggggacgagatgatttttttagtagaaagaggtttttgtatggtgttttattatcgagatataatttatgtgttacgtaatttattatttaaaaatgtatagtttagggtttatttagaattattttagtaatttgattatagttggtttttgttggatattatgaattatattgtttaaattttttttatttttgttaatagtggttgttttttttcgttttttaattttagttatgagatgtttaaggaggagtatgaggtggttgtgttgggggcgttttataattttgtttttttaatgtttattatgatttatatttgtagcgagattttttgtgtttgattatgttgtttggtttttgtttaatattttttttatgaatttttattgtttgggatttatagtatttatttattttttgaagtttagggataggaagatggttggagatttgattggggtttaggtttatgtttttattgttaagtatttgaatatttgagttttgattgtgtgtattattatgattattttgtttattattattattttagtgttgatttttttagtttgtcgatagattaggaggtattatttaggttaggagttttgtttatgatttgtattttatatattttaatttttatttttcgttttggttttagagttgagttttgtattagttttttatttttatatatttttttataatggtatttaataaagtgtaggtgtttttggttaaaaaaaaaaatgtattggttagtggtttttagtataattataatatcgtgttatagtcgttattatttaattgggaagattttttttttttaaaggttagttaagtaaagtagtgggagcggagaaggaaaaaagaaatttgtaattggttgtgattaattagttgtaaatattattatattttgattagtttaattgggaagatttaaggatgtgatacggtttaatgggtttagaggtagaagtgatagtaatttggaagtaggagattgtttaggtagtggtatttcggtgggatagggtaaggagattggggagtttatttttattgtaatattggaaagagggatgttattagagaaatgggggtggtgatagataggaggttgtggtagttgtggtttttatggtagagattttacgtgtgatatttagtatatggggtgttgtgggggttttagagtattttgattatagttgggatagttatagtgtttaggaagtttgtatagtaatttaggttgaattttgtgtagtgatttaggttgaaagtcgagattaaagtagtggttgtgggattaaaatagggttggaggagttttgagtatttgagaaggaaaagggggaaattagaaggtattacggaaagagaaataggggaggaagagaggatgatgttatgcgagacgtgtagagtgtttttgtagatttgttatattggaagttattatggttttagaggtatagatgttttaaagtaggttggaaaagggagtttggggagagtttggtgttggagtggatattggtaagttgtttttttggttttttgattatttaggggttgaatagagaggtagtttcgggagattttatatatttataggaagtgattataagaaaggggatttagttttgagtaaaagggaggagaaggagattgtaaagttgaaacgtttaagagatttgtcgttttagcggattagttggggtaggtgttttagaaatagaggtagttgaggtttggaaataggtttgtaaatttggttattggttatatagttagtaacgttgtgcgcggttgaggggagtgtgttggaagaataattaggtttcgttttttttgtaagtgtgttttggaaagaataagcgaatgatagttagtttgatggggtggttggcgaaacggttttggtgaggtacgttattttaggggtgggggtgcggggatggggtggtcgtaatatagggagggcggtagggtttaggtcgtgtttatgcggttggggttgtatttttagttgttcggagttagttttcgtatttggcggcgttttcgcgcgtttttttttttttgggttttaggtttcgttagttaaagttttttaggttttttgatcgttggaacgtttttttttgagtgtggtttcgttttttaagttcgtgattggttttaagttgcgggcgttagtttttattgggtgagcggttattggggtggggttaggtgataggaaatttttggtgggttttcgcggtttcgttgggttggtagtcgtttgagttattgcgaggaaagtaaagtttgggttatggagatgagtttagttttgttgtttttgattcgtattgttttttttgtattttagggagttgttgttggtaagtggggtttttggcggttttcggcggagcggtagcggcggggcgtttttgggggttcgggtgggtagcggcgagcgttgtgcgatcgaggcggggtttaggtgcgttgtcgggggtgcggggagtggacgcggttcgttttcgttatattttaattttgtttttacgtttttttttagtttttttcgggatcgtttattattcgttttttgtattttttggttttgttttgtattttttttttttttttttttttcgtttttttttatttttcggataaattcgtttttttgaggtttttgggtttttgggttgtttttgtgaatggtattcgagggtttttttagcgcggtcgttgaggtagttatttttttcggtgttgggggcggttttaaggtttttgaagttttgttttttttcggagtcgacgtgtttttagtttttgggtcgtattttttggagttggggtttttttttttcgggattcggagttagtgttttttgttgttgtggggattgtggggtttttgatttttacgttgaggggttggagtttgtaggtttcgggtagaggattttttttgcgattttttttatttttagtttatttttttttggtttttcgttgtcggggatttttttttgttttgtatttttttttgttattattaatttcggtgatttaaggatattagatttttttttatttttttttttgtttttagggtattttgggttttgttgtttttttagttttttgttatttttttttatttgtagttttttgatatatttttaggatgttttttgttttattttttgttttcgttatcgtaggttttttttgttttttttatgggttttttttagaagtagttttaatttagggttgtttttatgttttttatttttaattttttttgattttaattttttggtgtcgttttttgttttagggtttttttttcgttttatttttttttagattatttaaggggagttttagtgttaatgttggttgggttttaggtagggtatagggtagggtagatgtttttttttttttagtgtaggtgtttgttttgggttttgttttacggtggttttttttttatttttttatttttagttttatttttttgaggattttttattttagtttacgggtgttggattatttttttttggttttttcgttttttttcgttttgggattttgtgttgtttttattttttgtttagttgttttgggtttttagtaagtttttattttttttaagttttatttttatttagagtattttttttttttgtttttattttaattaaagtttttttagggttatttttatattatgtttattttattttttagtttttgttttgtatatttgtttttttttatttagatttaatataggtcgtgtgtttaattgtttttttttttttttttttttgagacggcgtttttttttgtcgttaaagttggagtgtagtggcgcggtttcggtttattgtaagtttcgtttttcggatttaagtgatttttttgttttagttttttaagtagttgggattataagtgtttattattatatttagttaatattttgtattttaatagagattgggttttattatgttgatcgggatggttttaattttttgatttcgtgatttgtttgtttaagttttttaaagtgttgggattataggcgtgagttattatatttagttggtaatttattttttaatttttggaggaattaatatattgttttttataataggtgttttattttgtatttttaaatgtattatataaaggttttagtttcgtaatttgtttgttaaatttgatatttttgtgtgtgtgtgtgtgtgtgtgtgtgtgtgtgtgtgtgtgtgtttgataatagttaaattaattggtgtaaagtaatagtttattgtggttttgatttgtatttttttaatgattgttgatgttgagtatttttttatgtgtttgttggttatttgtatattttgtttggggaattggttatgtaagttttttgtttatttttgtattagttgaatgttttttgtttgagttgtaggagttttttatgtattttggatattaattttttattagatatatatgatttgtaaatatttttttttattttgggggttgtttttttattgtgtttattgtgtttttaatgaatttttttattttgatgagtttaatttattaattttttttttgtttttgtatttttggtgttatatttaagaaagtgttattaaattttatggtatgaagataattttttatgttttattgtaagagttttttagttttagtttttgagtttaggtttttgatgttttttttagttaatttttatatgtggtgtaagttagggatttaattttattttttttttttttttggtatgtgaatatttggtttttttagtattatttgttgaaaagatgtattgattttttaagatttttgttattagtttattttaggggatattaattggtttatttatttttttatttggggtattgttatgttattttgaagtttatattattgtttttttttgggatatggatttcgtagaaaacgtttttggtattatagtttatttgttttttttgttttatagttaagttttttttgtttttattttgtttatgttgagttttttttaaaggtagtggattttgtttttattttatttttatttgtgtattatagttatggtggttatgggtttttttgagtttgggttttttatagtttttgtttttttttttggtaagattttttttttattattgtttttatgttttttttttgaatttgtagggtagttttttttattggttttttttttatattttgagggggtttgtggttgttttgttttggtatttggtttataagtttgttatttttattttttttttttttgttttttagtttttttttttatttttttatttttttagttttttttgcgtttgaaatttttatttttgtttttttgttcgtgtgtattttttgtttttttaggaaggtcgggacggtagatttgtgtgttaaatattgatgtgaagttatttttaggaagaagttttatttgtgatttttttttttttagagttttatagtttttgttataattttacggtgttgtttcgggatggatttgtgtagttagggtttttcgttgagggatatttggatggttagttttttttgttttgtgataggtagaaaggtagggtagggtttcggggatagtgggtagaagtagttttgggagttgagatttgggatatagagattgaagatttgatagagaatgggtaggagtttaggaggattttggattatattaagggttagaaaggaggtgagagtgggtagtgggtaagagtaatgggagaggttttttttaggagagttgggggtagagagtaggatttgtttttttttattggatttggttgtgagtaggggtgaggaatggtgtttagcggggtttagtttatatagggagggatggaagagggttagggaggggttttttttggttcgagttttttatttggattggaatggagaagttattgttgggtaggggtaggtagttttgtattttttttaggagattagggtttgtgagattaggaagttagtagtattaggggttttaggtatttttatatatatgggaagtttttttttttttttaatttggagatttagtaatggatagtgtttcggttttttagagtttagattttggttatgaatgttataaatttttgggaggaaaatgttatgtagattaagatatattattgttttgtgtaggtagattatatgtaaaagttatggtgatatttgaaattttggaggtattagaaaaataggtattgtgaaagtagtgggtttttttatagaagtttgaatttggggtgggtattaggtaggaaaggaaggttttaaggttagggttgttttatttgttttttagtttgtttattttggagagttattttttagttttacgatttaggagtttatttttgataattttttttttagtattaaagtcggagttttagagtgtgaggttatagttttgaggtttattttttagtaagtttaggggaattggattttaggtaaggatcgatttgtagaaggtttggggttagtgtgggttttagcgagagttagaataatagagaggattagttttgttttttgtattttttttagaggggagaaaggtttggttatatgttttattggttttgtttttttgtttttaatgatttttatagtgaatgagatgtatagtggggttttagaaggtaatgttattatgatgtgttggtttttattttttatttttggaatatttttttgatttggtattaggatgaggtatttttgagttaggatgtttagtagtttaggggtgttttgtttaatgggaatgggatttattagatttgtatggttattaggatttttcgaggagaggagtagaggtttatttgttatatgggatatagagggaattatagtatttattttgtgttttttggtgagtttggggtaatttttaagggtttcgatttagggaggttaggttagggtggggatagtagggacggttgtggttttgcgtgtttagtgtgttataaggttttttttttagagaaggttttggtgttttagagttaatggtagttattttgtatgttgttattgttattgttattattattagtattagtagtagtagtagtattttttgtgttttttggtgtaagaagaagataatattagttgtagagtttaggtgagaaaacggggtagtggttggagatggaaggatttttttttgggtagtagggtttttttatagtttttgtatagatagatatgtaggtaataaggttttggaataggggatggatattggggtatttgggaggggaatgggagttatatttttatttatatttttaagttttgtttaagttagggttgggttacggtttttaaatgtttagtggtggtttttttttgttgtaggtgaggagtgggtagtagggagggtcgtggtatttgttttgtttttattttggttttttttgttttttgggtttattacggtgcgtttaggtggggtgagttgagaattacgtgttgattgttgagggtttggatgattatggttttagtgggagtaaatagtaaaggcggttgtgatttggggaggagttagaaattggagaggaattcgaggaaaggcggtgtttttagtttttttttttttgtattttttttttttgtttttttagttattaggaggatattaagaaaaagatttacgaagtttagattgggaggtttgtttgtgtagtttttttgaggtttttttgtaatagggagggttttgagtgtatacggttatttttgtttattttgtagttttttatgggttttttttaggagttgttttgggggtattatgttttttgtattattggaggtttttattatatggttttgtttttttgagtttttgtgtagatgttatggaggagtatataagtagatatttttgggttatttgggaagtaggaattagttttttgttagggtagttgtggtttttgtttttattatatgtttaagtgttattttgtttagtttttaggaatatagtttttaggattatgttttttggggtatttatagtaggggtagtgtaggtttggttgtttttgtttttatttgtagtattttttgtagaggaattgttagttttggttttttgtgggtagtaaaggtttttttgtaggttattggggtattggttagaaaaaggttgtgaaaattatatgttaattttttaaaatttttgtttttaatgttgatgtttaataaagatgtttataattttagttggatatttttaataggattttttttaatatcgatgttgtaaagtatattgaatggaataggaatttaaatttgaaattttttttttagaagggtttatgtgggagatggtggttgtggttgtggtaatttttaggtgtagagtgggcggaggtagttttaggttgaggggttttaagaaattttttattttatagggagaagaagaagattttttgtgggtgtgagggtagtggtttgggtggaatttttgttaggaattagataggaaggttttgtagttttattaagtaatagttttggggtggagttggatttttagggatgagtggattaggtaggagtagggtattttaagtgtaggttatggatttgggtgttaagggaagtagagtttttttgagtaagggggtttttagggttaggttaggtgtagattttatggtagttacgtgtttttattttgggtttgataggtttgttgggttttttggtgggttttttaggtaggagttgtttgtttaggattggaaggggaggaatattgagttgtaggtggagggcggaatttatagtgggtagggtttgttttggtgtgtaggtgtttttgtaggaaaggagggtttggggaaagagggagagaaaggttttgtgtgtgatttagtttaggtttggaagtacgtggagttagggtttttttttggggaggttttttattgtgtttaagttggttaggtttgagaggaggggagggtattgagttttttttggagttttgttatttagttttgcggtttttttagtttttatagagtgtatagtgggtatagggtaagtgttgatttttatgaagttatgggaagggattggtaggggttgagaaaagtgttataggagggagaaaaatgtgggagtattatttttttttagagaaagggtgaatttgattttggagtgattgaggagggagaaatttttagggagtaaaaagtagtattttgtatttaggggagtatttattggtttttttattttttttagagtacgtgagtttgtaaggttcggattaacgttcggttgggataggagattattagggtagtgtatagttgggattttagtttttggtgttaatttttgggtttattggttttattgagggtagttatattttgtagttagatggttagaatttaattttttgtttaggttttattagtatttttttatttggtgttttagtttttttatttatgaaatggggaagttaatagtatttattttttgtggttgggtggatgaaaagcgttagtatatatgaggggtttgtagttgtgttatattatttttgttattatttgattatattttaatatattatatatgcggttattgtattattattataaatgagatttatgagtgagtgttttggttacggttttttttggggagtttaggattagtttttttggtattttgaggtttttttattttgttatatttttatgtattattttatatttattatgtttttataattttatattatagaaatttattttttaagtagatatttttggtttgtgttttattttaagtgtttgggaagggatagagtatgaggtttaagagagaaggagaggtttgttttgatgttttgatatagtataaagaaatttttttattttttttatatttttttattagttttcggtgatggatagatttatagtaatatagaaagggttgggaagggatggaggggatatttgtagttagtgtttaggggttgattttgtgggaagatatttgttttgtagaggatttttgtattttgtagatgtagagttgaagtttgatatgagggagaggatagggagtgttttggatttttttgattaagaagaatagagattagtttgtttttggggttaagtgattattggggagattggattgaattaatgaagaataaatgaattgggaatgaggatgagtaaagtaagtattagtattttttattattagtttagattgattggtaggtggggaggtgggatagtttttgattttgttgtgaggttttttttaattttttggttttggggtatagatgggtggtgttttttttggttagggtagttttagttttatttaggtaaggtagtggtggtagggagagttaggggattatttgtgaaacggattaaggtagggatgggagttttttgtgtagtaaaagtggatgtaaggtttgtttagaagtaagaggatgaaggaatttagttgggttttggtttattgtttgtttgtgtttataggttaattagtaaaggaggtggggtagagaatttaatcgtgggttatttatttagagatgtgtttataggtgtattattttatatttgtgtttacgtttggtgttaaaaatatatttatatatgtttgttttatgtttaagtatttttatattttagttaatttttaaatattattgttgaatgcggttgttattagatataaatttgtatatttattgaagtttttgtttttattttaattaaatttataattgtgtataattgaaagagttaaatatttgtgtagaattttttgagaaaaatgagagttttttttgtttttttttaatttttgtttttttaggggttaattatttttaagttttttagttgatttttttgattttatttttgtatttttattatttttttattattattgtttgattttttttagatgtatttattgttgtatagcgtaatggtggatgtaatagttaagagtatttgtttttttttattttttttagtatatttatatagtgattatgtttagtttagttattttttgttttttttattatgattaatttttttatatgttaattggattattttttattgtttgtataatattggttttttttggagttaatatttgtatttgtttttgtttattttattaatttttattaatttaagttcgatattttttttgtttgtatgatttttttaagacgttggatattttggatattttgttaattttatttttttggaaatgttttttttgggtttttttggttgtttttatttggattggaggttttttttcgtggagtagagttattgttttaggatttttttttattattatttgggaaggtgttttatatgtagtggagttatttgggttttagttaaaatgtagattgatttaatatgttaaggttgggtttgtgagtttttttgtttagttttaggaggtgttgatttttttggtttatgggtgatagttggggtagtagggatttttttttttgttttatagttttttgtatttaaggtaagcgtatattaatatatttttaatgaattaatgtattttttttttaaattagtaatagggttaattagttttttttttgggttaaaaattatattatgtaaaatttggtattttaattattttaaagtatatagtagtatagtattaattgtaaatatatagttgtgtaatagatttttagaattttttattttgtaatattgaaattttatgtttattgaataaatatttatttattttttttatcgagtttttagtagttattagtttatttttagtttagatattttatataaatggaaatgtgtagtattgggttttttttgtgattggtttattttatttagtagtgttttttaggtttatttttgttgtagtttgtgattaggttttttttttaaggttgagtgatatttcgttgtcgatatatattatattttttttatttatgtgttggtgtgtgttgttttggttatcgtgaataatgttgttttgaatatgggaatataatgtttttttttttaaatttttttttattttggtggaattaattttttagtagttatttttgatagtatatatttaaagtatgtttgtatggtttaatttttttattgtttttattttttttaggaagaggagataaatatatgaaggtgttgtttggtatagaatttaatagggaagaaagagatagtataatttattagtgttgggttttattattttgtaattttagaataattatgaatataaaaagaattttaaaattttagttttgtttagaaaggggaagttatttttaaatatggtggttttggggtagttggtttttttgttaggttttttttatgggggttttttttgtagtgattgtggtttttttttattttattttgttttgtgttttgattgaagcgataaggtgtgtttgtagttgtgtttatatttggaggaaattttaatggtgtgagtaaattgtaaatgtttatttattatgggttattttattatttatgaagtatgtattttgattttattttattgataatataataaattaggatatgatgattttagtagtatatttttttttttgtgttaagaagtatcgttcggggaggtgagaagaagatagttttttttagaattgaagaattagggagaattagatgggttgggtaggtgggtttttatttggaatttggaggatgagtaatgatatttttttattttgagtttagtttcggtatttattttttgggtttatgagtagtgtagtggtgttttttagtggtttttgtttttttttttttagattaagtataaatttgagatttaattgttttttttatgcgtttgggtttttttattggatattagtatgagttaatttttttgtaaagtagaataagtacgagattggattatgttagaggaggaatggtgttatttttatttttggagagatttttgttttcgtgtttgggggaaggattaagttttatttttatgtagagaagaggttttgattgtaattgtatttgtggagaggtgaggatttgttttttttatatcgatggttagagtttttagagtggggttaggttttttttttagttgtgttttgttaggtttatttaggttttaaagaatagattttggatattgtttttggtaatgtgagttggatatatatttagatgtaaggtagttttgttaagtattttggggttgttagtagttttgggtgtttagtgtttggagcggagggtgggaaggaggtttgatgtagaataagaattatatgttatatattattttattttttattagtgtttttgttataaaaaattttacgggtattataaaagataaaagatttaaaaatggtgttttttaattaaaagtaaatattttttaattattagagagagggagaagtttggtagttgatttagaagttttattaattgttttagtttaatgataaattttttttttttttaaataaaagtatattttggtttatatggttattatttttttgtataattttatatttttattatttaaagttatagtttagttttatttttaagagtatatttttatttttatttattttatagatttttgtttgaaatttatattgtttggtagttttttgttttttgtattttgtagattgtattttaaggtgtggtttaatgtatttttatgatttgtattttttgtaaattggtagtttgttatagaggtttgcgtatatttagggtttttttttttttttttttttttgttatgaggattgatggtattatattatgttttttattaagaggaagaatttaatattagttattttttttttgtgatgttaattgttattgttgtttagtggttaaatttgttaatttattataaattgtaaaagttttagttttttatttttttttatatattagttgtataatttttaaaataaaagatttatttttttttattagttatttatttagtagaaatttgttttttgagagattaaattaagtttttaattatttatgatttagtaattttattttttgttatatattaatagaaatgtatgtatttgtgttttaaaatatatgaaaatattatttatagtagtacgatttttagattttgaatataatataaatgtttattaatagtggagagataagaagtgtgagttatttataaagttgagtatttgattgttacgggagtgaatagtgattatatatagtaagatttgggatatggtagtgattgtgtttagaattgatagaattaatttattatattagaaattaagaaagtgtttgttttagggttggggagggtgatttatgattaagtagaatttagtggtgttttttggaggttggtaatgttattttttgatgtggttgttatttatttgagtgtttattttgtgaaaatttacggtttatttatggtttgtttatttttttttatgtatgttgttttttatttaagtatatatttttgatgttttgaaataattttttttaagttaatatagaatttttattattgaaagtttttagaaatgttgtattggaaaaaattagtttaattattaaaaatttatgaaataaatgttgtgatttagatattaagaggagaatttataataagagtagtaggtttgggagttaatataagaatagttttggaaatggttgttgagttaggaattaggaattaaaatttaaaaaggtttatgtaaggtggagggtgtgaaatgatgttttagtagtgtatgaatgaatgagttatgggtagtggtttatgggttgtttggttagttaggaatttgagtaaaataaagttggaaaattgggggatggaagagagaggtatgtatagattttttgatatgggtagagttttagaagatggtggttgtaggtttttttaaatagagaatattaataaaaaggtagaaattttataaagagattagataaaaagtttggagttgaaaagtgtaataattgaaatgaaaaatttattagaggggttttagagtaaattttattatgtagaatggagaattagtaagtttgaagataagataattgaaattttttagtttagtagtagaaagaaaaaaaattatgaagaaaaataaatagaattttaaagatttgtgagataatattaagtatatgtattttgggagtttttaaagaaaggagagagagaaaggagaagaatgattatttaaagaataattttaaattttttaaatttgatgaaaaatattatttatttaataaatttgataaattttaagtagtaaaaaaaattaaatttaaagaggtttatattaagagaatattataattaatttgttaaaagttaatgataaatagagtatattgaaatgaataatagagaaggaattttttaggtttaatggatttttaataagattgtagtttagttttttttagaaattatagagtttagaaggtattggaatgttgataaatttagaggttagaaaaaaaaagattgttatgtaggaattgtgtgtttggaaaaatttttttttagaaataatggattttatatatatataaatatatatatatatatatatatatatatatatatatatatatatatatatatatatgattatatatagtattatatatatataattatatatagtattattatgaaattatatatatagtattatatatagtagttatattataaaagttagtagtaatatgtatatttttggtgtttatatgtgtgtgtgtgtgtgtgtgtgtgtgtatatatatatagtattatatatagtagttttataaaagttagtagtaatatgtatatttttggtgtttaattttttttttgttttttttatttggtttaaaagaaaatgtttattgattaatgaatgaataaataatatgtagtgtatttttataatggaatatgatttagttataaaaggaatgaaatattgatatatgttataatattgttgaattttaaaaatatgataagtgaaggaaattagttataaaaggatatatattttatgaatttatttttgtgaaatttttagaagagattaatttatagagaaagaaagtagatttgtggtgatagggtttggtggtaggaggaaatggagggtgattgtttaatggtgtagagttttttttgaggtgatgaaatattttggaattagagagtgatgatggttatataatattgcgaatttattaattgttattgtattgtatatttattgtataatgggtatagtggtaaattttgtgtttatgtatattgtattatagtaaaaaagaggttgaagaatagattttaaaattttttatatggtaaatttttgagtttgtttgagtatttgtttatttgttttttttttttaggatgttattttttatttagagtttatttttgtttttttgtaagtagaaagtttttttttataatatttttagattagttagatttaatttttaaaatgattttttgttttggatttaaatgtttaggtgtaattttggggtaattttagtgggagtgaagagattatttaattaggatgatttatttggagggaaatgtttgattttatgttaggaaagttatttgtttttttaaaaaggattttgtttattagtgagtatataatttttttatgttcggggtggagtttatagtagaggaattaataatagttttaggaatattatatattttatgcgtagttgatttatttatttgttttttttagttgaaggaaggagttggattattattttggtttatttattaattgtattttattggatgtgtattttttataagtgtgaattttttagggtttttagttgttttttttgttgttgtgtggtttttattggtgtggtttatgtttagggggtttgtaggagattgagtgttttttaatttttaaggttaatatttttagtgagtttaaatgaagattttatgtttttagggatttatatttttatttgtggaagggaaaaatttatttcgttgttttaggtgtgatggtaattttatataaatatatatataattatagtatttttatgtttataaatgagataattagtattttataaattgatggtatttttagtattgattttattgtttagttaaacgttgtaattaaaggatgagttatggagtggaggaagaatatttttttattttttggaggtgttataatcggtatttttgttttatggattttaaatgagaaatttgttttaggttgaggttggaaggagatttgaatttttttgtattattattattttagatggggttttgttatgttgtttaagttggagagaagtgattatttataggtgtgataatagtatacgatagttttaaaattttgggtttaagtgatttttttattttagttttttgagtagttgggattataggtgtgtatttagttattttttattgttattttattttaaatgttttattttgaatattagaaatgtgaaaatttatttgattatagaagattttaaaatatatagattaatgtttatttgaattaaaaaaaataaaatatatagaagaaatattatttaggtttttttttaaaaatattattgttattgtattgttgaatttttttggatttagtgtgattgttggtttttggagttgttttttgcgtggtgttgatttttattttgttggtggtggtttgtttttgttttcgtttttgtttttgaaatataattttattttgttattgaggttggagtgtagtggtgcgattttagtttattgtaattttcgtttttcgggtttaagtgatttttatgttttagttttttgagtagttgagattatacgtatgcgttattaggtttagtaaattttttgtatttttagtagagatagggttttgttatattggttagtttggtttcgaattttcgattttaagtgatttatttgttttagttttttaaagtgttgggattataggaatgagttaaggcgtttggtttattttgttgttttttatgtatatatttttataggtatttttattgtataaggttgtatttatatgttatgggttattttgaatgttgttttttgaatgtattattatataagtagttttttatgttgtaaattttgtataaagtttatatgtttttttggtcggtatggtggtttacgtttataattttagtattttgggaggtcgaggtgggtggattatttgaggttaggaattcgagattagattggttaatatggtgaaattttatttgtattaaaaaatataaaaaattagttaggagtttaggtatgtgtttgtagttttagttatttaggatgttgagttaggagaattgtttgaatttaggaggtagatgttgtagtgagtcgagattattgttattgtattttagtttgggtgatagaatgagattttatttaaaaaaatttttaaatttaaaaagttgatatatttttataagttgtattttattttatataaggaggtgatgtaattgagtttttttagatttatttgtttttattttatttttttgtaggtaatattttgataagtatgtttgtatataaagatttttttgtggttgggattttaaaaatttatagattatttaggttaggtgcggtgttttaagtttgtaattttaatatattggaaggttaaggagggtggattgtttgagtttagaagtttaagattagtttgggtaatatggtaaaattttgtttttataaaaaatataaaaaaaaattagttgggtatggtggtatgagtttgtagttttaggtattttagtgtttgaggtgggaagattgttcgagtttggaaggttgaggttgaagtgagttgtgattatgttattgttttttagatcgggttatagagtgagaatttgtttttaaaaataaataaatttatagattatttaagtgataaatattaaattagagattgttttaaatattttaaagttttattatattgttatattgtgattgtattgatatatttatttatttaataaatatttattgagagttatttattgattatgatggtgagaaataatggtaaggaaatagattagatttttttattaaagaatatatattttagtgatattgattgtaatggttaattttaggtgttatattgattgggttaagggatgtttagatagttggtataatattatttttgggtgtgtttgcgagggtgtttttggaagggattggtatgtgagtgattgagcggggaaaattttttttcgttgtgggtagttataatttaattatttaggggtttagatagaataaaaaagtagaaaggagttaaatttttttttttttttttttttaatttgggatattttttttgtttttggatattagaattttaggttgtatggtttttggatttttgagtgttgtattagttaattttttatttttttatttttttttttggttttttaggtttttggttttggattgagttaggttattgttttttttggttttttagtttgtaggtggttttttatggattttattagtttttataattatgtgagttatttttattaataaatttttttttgtttatttatttatttatttatttatttatttatttatttatttattttattgggtttttttgttttggtaattttgatatattaatagataataaataaatagaatttgttatagtattagtgataattgttattgataaaaaatatatttaggttagaagattggtgggagtggcgggaatggtagggaatagattttagaaaaggtaattgggtatgacgtttttgagaatttgattatgggatatttgaatagagattcgaatggtgtgaggagtgagttatgtggattttcggggagtaggtgtatgtgggagttatagtaggggtaggtagtagagataggatggagtagtgataaaaggttggtgtgagtggagatgagtgagttgggttgagaatggcgggatgaggttataggggttttatgatgaggggtttgtaggaaacggtgagagattgaggttttattgtgtttaggaaagaaaagggttgaggtgtttataggatatgttttaattttcgtttgagaggtttattttgtttttgtgtgagtaatggatagtgggtatgagaggtagtaggtagtttagttggaaagtttttttggtttataatttttgagagggtggttttcgggtggtggtaggagaggagtgaaaagtgattggatttagtgttgatatatttgttaatattgtggtaaaatatatatattatgtaatttattttttaattatttttttagtgtataattcggtggtttaaagtatatttataatgttgtgtaattattattaatatgtatttttagaatatttttattattttaatagaaattggatttattaaattaaagttgtttattttttttatttttaatttttggtaaattttattttattttttgtttttatgaatttgtttattttagttgtattatataagtgaaatattatatttgtttttttgtttttggtttattttatttatagtgtttttaaggtttatttaatttgaattttatttatttttaaggttgaataatattttatgttatgtgtattatgggtcgtttatttaattatttttcgatggatattcggttgtttttattttttggttattgggaatagtgttgttacgagtatgagtgtataattatttgtgtgagtttttgtttttaatttttttgggtatatgtttaaaagtggaattgttggtttttatggaaattgtgtttttatttttttgaggaagtattatattgttttttatggtcgttatattattgtatatttttattagtagtgtataagtgttgtgatttttttatattttcgttaatatttggattagtgaagtttagtatatttttatgtgtttattgtttatttgtatattttttttggagaattgtttatttatgttgtttatttatttttgaatgagattgtttgtttttttgttgttaagttatagttttttatgtattttggatattaattttttattaggtatataattggtaaatatttttttttattttgtgtatttttttttaattttgttaatagtgttttttgatatataaaaaaggtttttaaattttgatagtttaatttattgttttttttttattggttgtgtttttgtttattagttaagaagttattgttatatttaatgtttttaagattttttttaatgtttttttttaaaagatttataggttgaatttttaagttgagttttttgaattattttgagttaattgagttaatttttgaatatggtgtaaggtgatgttatgaattttgtttaatattattattttgtatgtgggtattaaggttttttggtattattagttgaagtggggttgatatatttgtaagatgtagtgagtattgataaatgggaatattatgtatttatttatttgtttttattttataggtgattggaggaggtttttggtgataaatttaaaagaaatgaatatatatgaatttttattaaattaaaattaaataaaattataaattttaaaatgttaagagtgaggtaagattagaatattattagataggttgaaatatgttgaaatggagggtttattgttttttttgttttaaattttgttggtttataatggtttatgtttattgtataagggggttatagggaaggttgtttgtttatataaggagtttttggttttttttagaaataagtttaaattttttatttagagttaaaaaaaattaattgtaagatgtttaaattgaagttggtttttataaagttaaagaataagtagtaagtgtaaaataaattttaggaatttaaggaaattttatttttttatttagaaatggtttcgtaatgcgtcgttgaagggagagggttttttttaggaattttatgatgtaggggtttttgttgtagttttaaattgagttgttttttttttttaattgtaggttttataagattttattgtagttttaataattttatttggtttaagatttgaggggtttaatgttttttattttgagttgttgtttgggatttagaaaggtgatttgtattttttgttaaaatattatttttttgatggaatttgatattggtggatattttgtttttttgtgtggtttttataagggtagatgattttgtatttttttttggtattttattagtagtgatagaaggtttgaagttagggttttttttaatttttattttttttttaatgtagaggattgcggtttgttggtagaagagtagtgttttgggttttagttgatttgatgaatattaatatttaatgttttgtaatgaagttatgtgtgtatatattattatttttgtatgtagttttatgggaaggtgggtttttggattttaggttataggtttaagtattataggtatatagatggagttttagggaagggagagatgattggggtgggattatattttttttttagggtgttttttagtttaaggaagtttgtatttaagggagagaaagttttggtaggtttttttatttttggtaattttggtattggggttggataattatttgttatgtgggtgattgggttgatttgtgtattgtaggatgtttagtatttttggttattttttataagatgttggtagtattttttttttattttagttatggtaataaaatatttttttagatatagttaatgttttttggtgggaaaattgtttttggatgagaatatttgtttgagaggtagagatatttaggagttgggtttgtagagggaaagtgattcggaagtagatataagtagagtggggttggagaagataggaagggagtttaggtttggaggggtttggtttgatggttgaaggtttggagtttagaattttagggtatggggaattaaagttcgtgaggaatggggagagtggtagaattttttattgttagaatattatatttatatttattaaatatttagtttatggttttgtatttcggggaagttaggataaatttggttgtatggggttagaaagagttttggtaattttaggttttgtgtgttttttgatgtgatgaatgtgcggttatagttttttttgtaaatattgttgttaaatgtttaatttagagttatataggtttttaggaggtatagtagttagaggaaaaaagttaaaggtattaggggaaataatatgataaatttagtgtggagaagattttataggtatttggttttatttttgaaataggtaatgttattttaaaagaaaaaagatgggttgattgttatagattgtaggtaattaaagaaatataattaaaggtaacgagtggatattttaagaaaataagttataaaaaataggtataaaaatgtattgaaagaagtggagatatttgaatataaaaggattttaaataatattatggaattatttattttttttggtgtgataatgttggtttttatttttaggaggtgtgtgatgaagtatttagtggtttagtattatgggttttgtaatttattttagaatgatttagttaaaaattttaatttggattttttttataagatggtgttaagaacgaagaaggaagtttttgttttttttaaagtcgaagttaaagcgaaggttttgtaaggttaagaaggtagtgttgaaagatgtttatagttataaaaaaaataagatttatatgttatttatttttcggcggtttaagatattgtgatttcggaggtagtttaaatatttttggaagagtatttttaggagaaataagtttgattattatgttattattaagttttcgttgattattgagtaggttgtgaagaagatagaaaataatagtttatttgtgtttattgtggatgttaaagttaataagtattagattaaataggttgtgaagaagtttgtgatattgatgtggttaaagttaatattttgatttagtttgatggagagaggaaggtatatgttcgattggtttttgattacgatgttttggttgttgttattaaaattgggattatttaaattgagttaagttggttaattttaaatatatgtatatttttttattattaaaagaattttaatttttttatttattttttttttttatatatatatatatatatatttacgtgtatgttataaaaatatatttatttgtatttataaaaagatatatttttattttttatttttaaaatttatgtatgttcgtgaggtataagtgtaattttgttatattgatattttgttttttagttttatataaggaagttgttttatattatagagaaaatatttatgaataaattcgtattagttatagtgagaggtaatattttaaatagtttattttatgtttaagatatttaagttaaagaaatttaatagtatagttgagttttttttgtttttttttaatattttatttatattagggtttttgttttggagtgttatttttattagttgtgagagatattttagagttttgagtattgttagtgattggggtagaataaaaataggatttggttagagtttatagatgtggttagaggaattgtggggtgggtgagtttttttataggtttttgattataatattttaataattttagggattagttttttttattttatttgtagtttgagagtagttttttttgtttttatttatgggaagaaaatgttttgtgagaggttagaaaggaggtagggttataaggttttagagtaaatttttagtttttgattttagagaagtttttagaaaagtgtaattgtagatttagggtaggattaagaaatatgaagaaagtagatgtgggttttggattaattgtttttttgaggtttgttattagtagggatttttttttgtgatttgtgattgttgggattaggttttattattattataattatcgaagtgaagaatttgttttttatttttataggagttttataaatgagtaggtgttggtatatagggtttaggttgggtagatttatgagtgtggatggtgttttttagtaatgaggtagggtatatttttatttggggtttgtaatttttagtgggataagaaaatttagattttattttttatttttttttatttgagtttttttttttttatattatagtagcgattatagttttagtgattatagttttaaggataataaggttagtaacgatgtttacgatggggatggtgggttggggagattgttttgggaaaggaagggaaggtgaggggttttgatttttaggttttagttttgattttgttgaagagttttagaagggtttttgttttttttgagaaaagatatgatttttcgtttttttttttatttatttttttttttattttattttaggatgaggggttggggtagtttttcgtgttgtatatggtatgtgtatttttgtttttttttagaaggtattattatagcggtttatttttggaaggttttattttttgtaggtttggtttttataagttttgtgttttgggtttgtttttttttatttcgttgttaggttagcgtgattttcgtagggtagaagtttagggtttagtattttagggtggttttatggttagagatggggtggtgggtaacgtgtgtttttggaggatttgagaagagttagaaaatttaggtattttgtattttttatgggaaattttagtagtatttatgtgattaatttgagaatggataggatatttggggtggggaagggagtatagaatttagatattagtttggatatagatatttgggaaaattttttattttttggaaagttcgagtttttgaggggggagtagggatttttggttttgatttaagtggaggtcgagggattggaattagagttttaaatatattgagtgtgaggtagagaataaaatttgagagaaaagttacggggtttaaggttgttggagggtttaaaggggatcgcggatcggtattttagggattgttttttttttatttttttagagattttattttttaattgttttagagagtagggcggatttttatagttattttttggtatcggatttcgaaagttaggaagattttttttatttaggattagagggagggcgatattttagtattgggtttattttttttttaattttgtgcgaggttattttaagagatttataggagatagggaaggcgtttatggtttttggtatttgcgcgttgtagcgttttttttttattttttaagtatttgcggagtaattttaggtattcgttttttaggtaggttttgaatttttttgtatatttttttgttttatagaagcgttgggtgatttgagttacggtgttcgtcgcggtttaggagcgtaggttttcgtttagggagatgtaatttttgtcgtcgtacgcgtgttggtgatattcgcggaggaggcgttcgtcgggttttatgtcgtagttatttattttttggagggtgtgagattttagtcggttttcgtagttagtttcgtttagttagtttcgtttttttttcgtttaattcgcggggattttggtttaaattgaaaatgaatttgggtaaaggcgtttgggattttttcgggtggagggtttgggcgggtttcgttgtttcggggtagatttcggattcggagattttgagggattcgggcggttcgtggcggatggggggtggtcgtgatttgcgttttcggtcgggtttatttattagtttcgttttggttgtagcggcggagtaggttttttagggttattcggttagtttgtgcgttggttttggcgtattttgtggtttatttttaatattgcggttttttttgttttatttacggttttcgcggttttattttcggaatcgcggcgtcgttgtcgaatcgtaggaattgcgtgtcgtttacgtattttacggcgatgtagcggggtttttcgcggtcgggtcgcgatatagcggtgttgaaatattttaaggagtgggagtttgggggcgaggaggggttgagattcgttagattttttttcgggcgcggttttttgagttttgcgtttttatcgggcgggttttttatttttttttatagaggtcgtttttttttggatttcgtatttattcgtttaagtatcggttagggttagggtttttgagagtagtaggaggaggtttcggggcgttatgattttaattttcgcgtttgggaaaaatatgagtttcgcggggtgcgtgggattttagaatttgggaattgcggcgatattgattggtttttttagaaacgcgacgtttaatgggagtgagaaatggggtcgcgttatgagtatttaggaagaaggatttgatacgggttgggagagaaagagaaattttggggagatggggaatttttaatattgagttttttaattttagatatcgtttcggggtttgagtttttgagagttatttttggggttttgggattttgtttttttttttttttttttttttttgtgtagggtgtgttttaatgtttttttgagttttcgttcgggggttgagaaattagggagaaattttcggtatggatttagtttatttttttttattatttatttcgaaattttagttttttgattgaattttttgttttttattttatatttggatttttcggatttttttggaagaaaatttattttaaggagtttggtgttagataatgaatttgttttgagaatgaaggtgtagagatagttttttttttttttttttttttttttttttttttttttttttttttttttttttttttttttttttttttttttttttttttttttttttttttttttttttttttttttttttttttttttttttttttttttttttttttttttttttttttttttttttttttttttttttttttgttttttttcgttttttttttttttttttttggaaaagttgtatttgagtatatgaaataggatagagattagttttttttttttttttttttttttttttattagttgtagtgagtagtagaattttggtaatttttgaattattaggaattttttttttttttttttttttttttttgagacggagtttttttttgtcgtttaggttggagtgtagtggcgcgatttcggtttattgtaagttttgcgtttcgggtttacgttatttttttgttttagtttttcgagtagttgagattatagatgttcgttattacgttcggttaatttttttgtagagacgggttttatcgtgttagttaggatggtttcgattttttgatttcgtgattttttcgtttcggttttttaaagtgttgcgattataggtatgagttatcgcgttcgattaattaggaattttatgtgtaaaaattgttattttggttttttgatatataaatgtgtttaaatgtattatagttgtataatttttagagtttttaagttttgtttttttagattatgtatttgtgatttttgttgtattttaaaattatttttattttatagttttgagtttttgtgggagtttaggatattttttgataatataaagtagtataacgtgtgattgtatattgtaattaggagttaatatatttatttattttaaagttgtaagtgtttaacgtagttataatgttttttattagtgtttatgtattttttgtttttaggaagtattcgtatttaagtggtgtgtatgttttattggaatatttagtatttttttaaatttgaaaaaaagtagaaaaagtaattaatttttaggtagttttatataaggtgttaaaggttaaatgtaaggaatattttgttaggttttgtagatggatgtattaaaaatttataaaataatgtgtttaaagttaagaattttgttgtttttaaattttgtttttttgttttttttttttattttttgtttttttagttttttttttcgttttttttattttttaggtttttttttttttttagtttttattattttgttatttttgaatagtggttttagtattgttttattatttgttatttgagtgttttttttatagtggttttgttattgtgagttaaagtgtgtcgtttttttatttaaaatattttagtggttttatttcggttttgtgaagtttttagaatgttaggtatttgagtatatgagggtatatttggtttagtataggtattaaattaatttttgttgattagttgaatgaaatatgattgtataaaaatttaatcgtattatggaatattataaaatgaaaaatattggaaaaaggaaatattttattttatttatgtagtgtgtttattaatttataaatttattttatgtgtttgttgagtttgtgtatgatttttgtatgattgtataataaattattataaatattggttttaaataatatttatttattgtatttatttatttatttttagagatatggtttttttttgttatttacggtgaagtgtagttgtatgattatggttttttgtaattttaaatttttggtttttagaggtttttttgttttagtgtttggagtatttgggattataggtaagtattatcgtgtttaggtaaattaaaaaaaaaaaaaatttttttttgtagagaggaaggtttttttaaattgtttaggttagttttatttttggttgtaagtaatttttttgtgttatttttataaattttaggattataggtatgagttattacgtttgattaaataatatttatttatttatttatagttttttagttagaaatttgagtatgattggagggttttttgtttagggttttttaaaattgtgtttttattttgagggttttttttaggtttatatagaggcgatataatttagtttttgttagttgtaggattaaggtttttgttttttgtttattgttaaggtagagagaggttgtttttaatttttggtgtttattagtattttttgttatatagtttttttatttttagaatttatattggaggaatttttttatattgaattttttttatattgtgaatttttttgattaggaagaatttagtttttttaggggttcgttagatgaggatagttcgattagggataatttttgttttaaagttaattgatttaggattttaattatatatgtaaaaatttttttaaggtaggatttatattattgttggttgaataattggggttaggtgaatgattaaggttatacgtttattatgggggggatgatagaattagtttagtaaggtttgggttttttttttgagtttaattgggatataggtggaaattgaagtttaaataaagtaataattgtgaatgataataaaatatattttatttagttatggaaattttttttattttttaaaattaaatgatatgtttaatattttataattaatttaggttgggtgtggtggtggtttatgtttgtaattttagtatttttggaggtggagttaggtagagagtttgattttatgagttcgagattagtttaggtagtatggtaaaatttttgtttttattaaaaatataaaaattttagttaggtatggtggtgtatgtttgtatttttagttatttagatagttgaggtgggaagattatatgagtttaggaggtcgaggttgtagtgagttgtttttttgttatagtattgtagtttgagtgatagagtaagattttgttttaataataatgatgataataataatattaataaatttagagtaaatgaaaattaaagtgtaattatttatttttttttgtgaagttgtatttttttttattgttatattataaattattgaaaatgtaatagtttaaagtaataaatatttattattttttatagtttttaatgtttaggaatttaggagaggtttttttgagtgtttttggtttagggttttttataaggttgtagtttagttgttagttagggttgtattatttgagggtttaattgggttggggatttgtatgaaaaatggtttatttatatggttattggaaaaggttttagttttttgttgtttggtttcgggaggtttcggttttagttatatggatttttttataggtttgtttatggtatagtagttggttttttttagagtttatgattttagagatagagagagtaaaggtagaagttacggtaagttttttgttttatattaatagttattttattagatagaagtgaattattaagtttaggttatatttatagggagggaatgaatttgtatttttgtaaagtggagagtattaaagaatttgtatatatgttaaaagtaaaattaaaattattgttttagaattttataaatttaaagttgtttttatttgattataattttttaatgttttaaatttttttttttaaagtaatgattaaaatttgagatattatagagttttgggtattgaggggaaaaaagtttgagatagagaaaggagatattatagtatttttaagttttttttgtaaatatttttaataataatattttttttaatgagttgtaatatagttgagaatttatagtaattagattaaatagttttaagattttagtgttataataatagtgttttaaaaataagtatttgttttgtttaagatgttttaaatttagtttaagaatgttttaaatgttaatttttttatttaaatattatttttaaaaatatttgttaaattagattgtttttaaggtagaaaaaatgtgaatttcgtattttagttaatatatttagtttagtatgatgttagtaattttggttggatatagtagtttaaaatgtttagttttaatttaggaataagattttttaaaaattggttattgggtgggtattttataataaatttgatatttttcgttttggtttttaatgagatgtggtagatatgatttggatattattatgattttaaatagtattgttattttgtatttttatagtattttttaagtaattttattgtgttttttatttttatttgttattttattattggttatttttatataatttttttttgtttaatttattttgattagtaatgtgtatttttaattttgtaaaagtttaatttaggtgtgtgtgtggtagaatgtaatatcgaattttttgtaagatggaattattttgtatattagatcgaatattgtatattaaaaatttatggagatgttaatgagttaaggattaaatgatttatttttggttaaggttatttttatagtattttggttttttttattatatggattattataattggttttggtttaatgtgaatagtttttggtaagaattattgtaatggtaaaaattgtaattatttttgtattagtttgtaagagtttaaagttattgttttggtcgtagaattatattaggtattttttatttagattttgttaataattttttgttttttatttgtattttatatattgtggtattaaatttttaatatatagatttagaaaatgtttttttatattataattatatagggttattttatatgttaggaatattttatgagaagtaggaaaaaatggtgggaaggaaaagaaaaattaagaagagaataggtggagagaaacgggaaatattatgtatggataatattataaaaatagaaggaaataaattagatgtagataattattatggaataatcgaaatataagagaggtttattagttatttgttgttgtgtaataaattattttaagatttagtgatttaaaatagtgaatattaatttatttaaagaaaataatataaatattagtaaaattggagtaggtggaagaagttggataaaaaaaaggattttataaattggaaaagtaagaggttattggtgtgtaaatggaaatgattttgttggtttatgttttttaagaagtagatgatatgagattaaagttgtagtattttattagaggatttatttgttagaaaatatgggaaaagatttaggaaattttgggagagatagtagattgagatgtaagcgtgatttttaagtgagggataggagaggaggtttgttggatatattttagattataggtaatttaacgagagttgagtaaggttatagaggagttttttcgttatagttggtttttgttttttagatatgggttttttttagtgttttttttgttatttattattggttgggaatagtttatggaaagtagggtgtttgtattaatgttgttgaggatgttagagtataggagtagggttttgggagattatttgggagtatggtttaaatttttttttttgaggtttttgggtttttggaaattaaatttttttaggattggttgttggataattttattaatatttataatgggataaggggaattaggagattttttaagtggattattgggttttatatatattttttttgtttttattgtgatagtaatttaatttttttttggagattaggatttattatttgtgtttggagaggaggggattttttatttgttggtttttgggtatatattgtttaaatttttttgggggtaatagtaatgtgttttttagtaggtttttatttgttttgatttaagagtatttttttttagaatttaggattttttattttgtagagtataggtttgggagatgagaagtgtaaaattttatagtaggtgaatttaaggaatgagatatggagttatatttatttttattttttagtttttggatttatatgttttttttattgagaatacggtattgtagagatgtttttgatttaataaatgtattatgttttgaaagatagtatttattttttagagtgttttttttaggttggtattgagttgtgtttgtagaagatttgtttagtatttttagtggttggtagattttgggtggtgtagatggtgatagaattagtggattttatggttatgaaaatgttgtatttgtttttttgttaagtgggtttcgttaggaagatagtgtgttaagagtaatgttatgtttgtgaattaggaatgttaatagtttttggagagtggtgttgattgagggtttgagagtaggataggaaaatttatttatggaatggtgtttaattttgtaaagatgaatttttggtttttttagaatggaagtggtttaattaattatttagtagcgagtgttgttttagttatttaaagaaatatagttttattgaggtatattattggttttaaatgttaatgagttggatatttagaggtggtagtagttggatttgttttggtaggtggtagttagtgtttttggatttatatttagttttatttttgttattgtgtttgttttatttatgaatttattttgttaggtttgggttgttcgatggtgaaggttggttaattttaatttgtttgtttggttgtttagtgttattttaggtttggatgttttttggaggtgttaatataggatttatgtttaatttagatggattatttttattttatgatggatgttttggggtttgttcgatttatgattttttgagttatagaagttaatttatatgggtatttgaaattatatggttgtttgttgttttatggtaaggattttattttattaaggttagtaatatattaaaagttgtttttaataggggtatatgtttttgttgtggatgatatggttttattttagaattttaggtcgtttatgtgatttttttattggtgtttgttttagttttattttgtatttttttttaggattgatatttttaggtgggtttgagggatggcgttgttttatggtttgaatttgttagtgttttttttttagtaggtttaattgaagtaagtttttttttattttttttagagtgtaggttaaaataatagatgtgggatgtggtattgttagaatttaaagaggtttattaggtagtgtgtttttttttttgtagtgaggatgtaagatgtaatattttgttttttattgtggaggagaaatttttggatgtttttaattattggatgaataaaattttattatagtggttatttttgaatttttgtatggtttattttttattttttggagagtacgtgttttgttaaggtttttagtatattttttattttttatttatttattttagttaatatgatgttgttgatgaaataagttggtttattattttataggatgttaggttttttagattttttaagattatattatagagggtaggttagttataataattttgaggttaattattaataaatgtgttgtggattttatatgaattattttatgtatagttttttttattggaatggaaaggaatgtatttattaaatttatagttgtatattttgtgtttgaggttttattaatttgttttattcgtgatatttagttagtatggtagttgtaattatgatttttatttttttaagtttgaagtaattttatttattttttaggttttattaggtttttttggggatagattgttggattatatgaagataataggtaattttaatagtattttttattttttagttttttaatggcggtgttatatttataatatttatagtattttttataagatttattttgggatttaatattattttttatttggttaagatgaagttagttgtagaggtttttttttggtttttagaaaatgatagtttttattttagagatttgggatttaatgtgggggttattttagttgttagggtattaatgttaattatatatttggagaatggggagataaatagggttgggtttgtggatttagtagtttttttgtgatgtgtttagatttatttttagtttttgtaagttttattgtgttggggatataatggtgttgtaggtttgtaggtattaatattagtttatatttaatgttaatatttttttaaattttgtttgttttttttttttagtgtatagttttttgagtaaatgattgtaggtttttttgtagaaagatagagggaattgttttagtatatatttgttatgaggttttagggtttttttttttgggatagggattttttttttgtaattgggatttgaatttgaaatttggttgatatttaggaattgagaatgggattatgattttgtattgagttaaatatttttagttttttgtttattaatttttgtttttttattatagatgttaagtagtgtttttgttggttgttgttttttttgatattattttttattaattttttttataattttttgtagattaagttgttttagttgtttttttgagattgttaagttaatcgtgttttttggtttttgtaggttattgttattatttagttttttgtttttttaaggttatattttttttaggaatattaatgagtttaattataggattttttttttgttattatatttagtttgtagaggatattatttcgacgttttttagtaatgtaagttttttttattagtatatttttgaggttttggtggaaggtgtgttttatgggttttttgtggagtatggttttagtgggtattttggtttatatgatgtttttattttatatatttattttttttagttttattatttattttttatatgttttaggataattaatttatgtttaatttattgagagttggatattattttttttagtttatatgggtttattttagtagtgggtttgttttatgttttgaggtttttgataaatttatattttgagaaagtgtttttaagttaaaggtgttttttttaatttatttagtttgattttggttttttgattaaatatttttaaattttaattttagaattgttttttaggtttttacggggatataacggttgttattgtaaagtttttgagtggaatttttattgtattataggggtgaggtttttgtagtaatttttagtgtaggaagtgggaattattattagagaagggcgagttttttttgtatgtttagagagttttaaagggtatttataggataattttgttttagtttgtagaattttaggttttcgtattaaggttttgatttttttatagtaggtttgtttttgatgagtgtttaaatatttttgtagtattgtgatttttaaaatgatgttattagttattattttattttgtaaggggagaggggtaggtgttttttttcggtttgtttttattaggttttgtgagggtgggtggaggttttttttaagttttcgtttggttttattttagtatgtttttaggttttttttagttttggttttttttggttttgtagttataatgggtaatattgtgacgtattttgttttgtgttatagtgttatatatttaggtttatattgtttttaggttatttgttagttaagggatatggttatattttgtgttttttgtattttagttttgtttttaagtgtaggtgatgatggtatttacgtagaataaatgttatttgttattttcgtcgagtttagttatttaattttttaatttttattgggtaaggaagagtgtggtttttattaagaaggtaggatgttagtagttataggggtaattaatagggaaagtcgtcggaaaatagattttataggaagtataggtgtttagtggagatgggaattttgtagatttgatcgtttttaagtagattagagagattatcgttattaataatttagttataaaagtttattagttatttttaaaaagtataaaattatgtaatataattttttttaaatttttattaatataaaattaatttgggtattgtaattttcggtgggtaattgggataggcggtattattaggaaggcgagttttgtcgtgttttatgtgttagtgttttagatggcggtagtttttttagaagtattttgtattttttttgtatagggttagggttttagttttttatatatttttttttgtttttttttttttgttttttttttttttaataaattatttgtaaaaagggaaaattattttgaggataagaaatatgttaatgggaaatatatagttgttagagggtaaaaggttttgtttatttttattgaaaagtttaggtatttttgttaaagtttttttttttattttaggatgttgatttttgcgtttattttaatttgggtatcgtgttattatttttaagaagagaaaaattaagtagtgttttgtaaaggggtagtagtattttttatttttgattatgttaggtatatggttatgtagatgagtaggtgggggatataggtgagtttttagatttgttttttttttatagtatatttttgagtttttttaaatagttgtgaaaatgttatagatgtaagtatttgtgggttatttttatggggatcgttgtataaggtagtgttatttatttttagaattttttattatgggttatgtttagtgattcgaggttaagttaaggaagacgttagttatagggtgttatttttaggggtatgttgttagtaggggtaaagttatttttagtaataagatatagaaagaaagaaaaaaggaaggaaatgtagttaatgggtcggtttaggtttttgattttgttatataaaagaatttgagagtaagtttaaagtaaaagttagtaagagaatttattgtaaagtgaaagtatattttgatagttgattagagtagttgtttaaaagagagatagtattttttttttacgggagttttatatgattatttatgaataggtgggaaggggtattgttttaagtatgttttgtggttttttgaacgtgtatgtattgtggttgtatatattagtatatatattttacgttttattagtattttaattttttttttagagttgtgtttgttattattgtaatgagtataggttagtttaaggatattatttatgggtttttgggtttttttagatgtggggatgttttttttggtttttttatttttttgttgtaggatgttttaattataagtttaggatatggtttgcgtattgtcgaatagtttgttttttttattaatttgataagttttttgtttttttttaagggaggttgtgaatattttattttattgattttagaaggatagtatagtagtagttattatgattaaaaagatgattttagaagtgtaggataattttttatttagaggttgtggttgtgtagtaatatattaagaggggagtttagttggtttttagggtgtttattatttttatttgggggtttggaggacgttaatttttgagaacgttacgttttagtgagtagaatgaattgagagatatatagtaaagttttatatatttttttttttttttgtgttcgtagtgttttttattagtgtgttttcgttttttagttattattgttggttggttggaaaaaatagaataatagtaaaaattagagattagtttttggtgatgaagagaaatattggttatttttagtattttttagttttggttatggttgtagttttttagtttattttgtggggatgaatttagaaaaaagttataaattgaaatgaatatgttagaagtattggtttaaattaacgttgttttattaagttatttagtgaattaaaagatcgtttgttggattgttaatttcggtggttagagaaaggagttgaagaaggtgttgttagattaggaataaataattatagcggtaatagaaaatggaagattatttgtttataattatttgaataagggtaaggtgtatggaaatatattatgaattgatatttttagttttgtttgtaagaaaatgattaataaggtgaaataattgaagtattacggaagatatattaaaaaaaaaaaaagtttttgtatagtttgttggagttatagatgttttattttagagtagaataatgtttgaatttttagggtttatttttgtcgtatttattagtaattataaatgtgatttaattttattttggaaataatgtttatttattgtgagatgttgtaatatgaattattattatatgttaatatggtatatggaattttgagtgtttaagttatatttttagagttgttttttagtagttatgtgagtttttattttaaaaatataagttaaaaatttgttttgagtgaaggatatttagggtaaatggtggttgaaagtgaatgagatt
